United States Patent Application Publication US 2020/0002727 A1 - sequence listing, part 3

SEQ ID NO: 36 - DNA, 1106488 bp, Cricetulus griseus
  modified_base (163)..(2934): a, c, t, g, unknown or other
  modified_base (8456)..(8619): a, c, t, g, unknown or other
  modified_base (15799)..(16086): a, c, t, g, unknown or other
  modified_base (17737)..(17967): a, c, t, g, unknown or other
  modified_base (20752)..(27272): a, c, t, g, unknown or other
  modified_base (37964)..(37993): a, c, t, g, unknown or other
  modified_base (39955)..(39964): a, c, t, g, unknown or other
  modified_base (45054)..(45065): a, c, t, g, unknown or other
  modified_base (49093)..(49166): a, c, t, g, unknown or other
  modified_base (56967)..(58551): a, c, t, g, unknown or other
  modified_base (60598)..(60676): a, c, t, g, unknown or other
  modified_base (63030)..(63997): a, c, t, g, unknown or other
  modified_base (83605)..(83705): a, c, t, g, unknown or other
  modified_base (91044)..(91277): a, c, t, g, unknown or other
  modified_base (91962)..(92175): a, c, t, g, unknown or other
  modified_base (102066)..(102082): a, c, t, g, unknown or other
  modified_base (114085)..(114381): a, c, t, g, unknown or other
  modified_base (125782)..(125791): a, c, t, g, unknown or other
  modified_base (128879)..(128888): a, c, t, g, unknown or other
  modified_base (137854)..(137874): a, c, t, g, unknown or other
  modified_base (151312)..(151323): a, c, t, g, unknown or other
  modified_base (154767)..(155281): a, c, t, g, unknown or other
  modified_base (155764)..(155776): a, c, t, g, unknown or other
  modified_base (164226)..(164392): a, c, t, g, unknown or other
  modified_base (166478)..(166507): a, c, t, g, unknown or other
  modified_base (168031)..(168330): a, c, t, g, unknown or other
  modified_base (168496)..(168698): a, c, t, g, unknown or other
  modified_base (169262)..(169508): a, c, t, g, unknown or other
  modified_base (170999)..(171107): a, c, t, g, unknown or other
  modified_base (173262)..(173553): a, c, t, g, unknown or other
  modified_base (177094)..(177168): a, c, t, g, unknown or other
  modified_base (203588)..(204814): a, c, t, g, unknown or other
  modified_base (207834)..(207861): a, c, t, g, unknown or other
  modified_base (213726)..(213749): a, c, t, g, unknown or other
  modified_base (224899)..(224915): a, c, t, g, unknown or other
  modified_base (228923)..(229151): a, c, t, g, unknown or other
  modified_base (236770)..(238782): a, c, t, g, unknown or other
  modified_base (239121)..(239607): a, c, t, g, unknown or other
  modified_base (256938)..(257035): a, c, t, g, unknown or other
  modified_base (284119)..(284128): a, c, t, g, unknown or other
  modified_base (284653)..(284698): a, c, t, g, unknown or other
  modified_base (285740)..(285769): a, c, t, g, unknown or other
  modified_base (287241)..(287251): a, c, t, g, unknown or other
  modified_base (287405)..(288527): a, c, t, g, unknown or other
  modified_base (298519)..(298620): a, c, t, g, unknown or other
  modified_base (299355)..(299364): a, c, t, g, unknown or other
  modified_base (299654)..(299696): a, c, t, g, unknown or other
  modified_base (306689)..(306712): a, c, t, g, unknown or other
  modified_base (327237)..(327305): a, c, t, g, unknown or other
  modified_base (339484)..(342669): a, c, t, g, unknown or other
  modified_base (346468)..(346737): a, c, t, g, unknown or other
  modified_base (352957)..(355119): a, c, t, g, unknown or other
  modified_base (355338)..(355354): a, c, t, g, unknown or other
  modified_base (357417)..(357713): a, c, t, g, unknown or other
  modified_base (367507)..(367803): a, c, t, g, unknown or other
  modified_base (372120)..(372133): a, c, t, g, unknown or other
  modified_base (380820)..(381165): a, c, t, g, unknown or other
  modified_base (386188)..(386311): a, c, t, g, unknown or other
  modified_base (391630)..(392473): a, c, t, g, unknown or other
  modified_base (396265)..(396347): a, c, t, g, unknown or other
  modified_base (405204)..(405213): a, c, t, g, unknown or other
  modified_base (406456)..(406490): a, c, t, g, unknown or other
  modified_base (426332)..(426396): a, c, t, g, unknown or other
  modified_base (429687)..(429853): a, c, t, g, unknown or other
  modified_base (451665)..(451674): a, c, t, g, unknown or other
  modified_base (453243)..(454085): a, c, t, g, unknown or other
  modified_base (463496)..(463579): a, c, t, g, unknown or other
  modified_base (467188)..(467263): a, c, t, g, unknown or other
  modified_base (468482)..(468500): a, c, t, g, unknown or other
  modified_base (471330)..(471358): a, c, t, g, unknown or other
  modified_base (481369)..(481668): a, c, t, g, unknown or other
  modified_base (514369)..(514378): a, c, t, g, unknown or other
  modified_base (531263)..(531311): a, c, t, g, unknown or other
  modified_base (532671)..(532680): a, c, t, g, unknown or other
  modified_base (540039)..(540096): a, c, t, g, unknown or other
  modified_base (563363)..(563509): a, c, t, g, unknown or other
  modified_base (570346)..(570449): a, c, t, g, unknown or other
  modified_base (576914)..(576935): a, c, t, g, unknown or other
  modified_base (583216)..(583455): a, c, t, g, unknown or other
  modified_base (587012)..(587064): a, c, t, g, unknown or other
  modified_base (588808)..(588817): a, c, t, g, unknown or other
  modified_base (599898)..(600107): a, c, t, g, unknown or other
  modified_base (601781)..(601794): a, c, t, g, unknown or other
  modified_base (626592)..(626694): a, c, t, g, unknown or other
  modified_base (627375)..(627402): a, c, t, g, unknown or other
  modified_base (630111)..(630386): a, c, t, g, unknown or other
  modified_base (630497)..(630577): a, c, t, g, unknown or other
  modified_base (639423)..(639434): a, c, t, g, unknown or other
  modified_base (640127)..(640178): a, c, t, g, unknown or other
  modified_base (648355)..(648600): a, c, t, g, unknown or other
  modified_base (652544)..(652712): a, c, t, g, unknown or other
  modified_base (652832)..(652925): a, c, t, g, unknown or other
  modified_base (657027)..(657090): a, c, t, g, unknown or other
  modified_base (667667)..(667725): a, c, t, g, unknown or other
  modified_base (673937)..(679924): a, c, t, g, unknown or other
  modified_base (680407)..(680434): a, c, t, g, unknown or other
  modified_base (682238)..(682269): a, c, t, g, unknown or other
  modified_base (687994)..(688042): a, c, t, g, unknown or other
  modified_base (688933)..(688947): a, c, t, g, unknown or other
  modified_base (726129)..(732038): a, c, t, g, unknown or other
  modified_base (733080)..(733117): a, c, t, g, unknown or other
  modified_base (741290)..(741344): a, c, t, g, unknown or other
  modified_base (743839)..(743848): a, c, t, g, unknown or other
  modified_base (745514)..(745993): a, c, t, g, unknown or other
  modified_base (746600)..(746715): a, c, t, g, unknown or other
  modified_base (752952)..(753022): a, c, t, g, unknown or other
  modified_base (753229)..(753544): a, c, t, g, unknown or other
  modified_base (758531)..(758792): a, c, t, g, unknown or other
  modified_base (762510)..(762615): a, c, t, g, unknown or other
  modified_base (766174)..(766183): a, c, t, g, unknown or other
  modified_base (767768)..(767797): a, c, t, g, unknown or other
  modified_base (780681)..(780790): a, c, t, g, unknown or other
  modified_base (784763)..(785306): a, c, t, g, unknown or other
  modified_base (786027)..(787582): a, c, t, g, unknown or other
  modified_base (788669)..(788854): a, c, t, g, unknown or other
  modified_base (795841)..(796531): a, c, t, g, unknown or other
  modified_base (796746)..(796851): a, c, t, g, unknown or other
  modified_base (804219)..(804556): a, c, t, g, unknown or other
  modified_base (807151)..(807255): a, c, t, g, unknown or other
  modified_base (810281)..(810290): a, c, t, g, unknown or other
  modified_base (822028)..(822048): a, c, t, g, unknown or other
  modified_base (826291)..(826491): a, c, t, g, unknown or other
  modified_base (833673)..(833693): a, c, t, g, unknown or other
  modified_base (840225)..(841208): a, c, t, g, unknown or other
  modified_base (855872)..(855898): a, c, t, g, unknown or other
  modified_base (858677)..(858686): a, c, t, g, unknown or other
  modified_base (859302)..(859311): a, c, t, g, unknown or other
  modified_base (863211)..(863710): a, c, t, g, unknown or other
  modified_base (863884)..(863905): a, c, t, g, unknown or other
  modified_base (870189)..(870278): a, c, t, g, unknown or other
  modified_base (872829)..(873849): a, c, t, g, unknown or other
  modified_base (874702)..(874712): a, c, t, g, unknown or other
  modified_base (884202)..(884635): a, c, t, g, unknown or other
  modified_base (886013)..(886235): a, c, t, g, unknown or other
  modified_base (886558)..(886567): a, c, t, g, unknown or other
  modified_base (888090)..(888099): a, c, t, g, unknown or other
  modified_base (892953)..(893193): a, c, t, g, unknown or other
  modified_base (895232)..(895241): a, c, t, g, unknown or other
  modified_base (895747)..(895800): a, c, t, g, unknown or other
  modified_base (914130)..(914235): a, c, t, g, unknown or other
  modified_base (925901)..(925934): a, c, t, g, unknown or other
  modified_base (942110)..(942909): a, c, t, g, unknown or other
  modified_base (943570)..(948256): a, c, t, g, unknown or other
  modified_base (952040)..(952241): a, c, t, g, unknown or other
  modified_base (954347)..(956856): a, c, t, g, unknown or other
  modified_base (962027)..(964193): a, c, t, g, unknown or other
  modified_base (964736)..(967224): a, c, t, g, unknown or other
  modified_base (967888)..(968702): a, c, t, g, unknown or other
  modified_base (969900)..(972329): a, c, t, g, unknown or other
  modified_base (976998)..(979487): a, c, t, g, unknown or other
  modified_base (982285)..(989211): a, c, t, g, unknown or other
  modified_base (1001164)..(1003286): a, c, t, g, unknown or other
  modified_base (1028002)..(1032268): a, c, t, g, unknown or other
  modified_base (1033965)..(1034830): a, c, t, g, unknown or other
  modified_base (1042537)..(1047439): a, c, t, g, unknown or other
  modified_base (1074169)..(1080307): a, c, t, g, unknown or other
  modified_base (1090242)..(1090530): a, c, t, g, unknown or other
ctagatttccttttttaaccataaaaatttagtaagacctgtatcctcttgaaggaaccagcttccttttggcagccataacagccgaacacgtacttgccataaatctgccatggtcacgtagaggtcagatgcctgtctcgtgacaaggaacccatcagannnnnnnnnnnnnnnnnnnnnnnnnnnnnnnnnnnnnnnnnnnnnnnnnnnnnnnnnnnnnnnnnnnnnnnnnnnnnnnnnnnnnnnnnnnnnnnnnnnnnnnnnnnnnnnnnnnnnnnnnnnnnnnnnnnnnnnnnnnnnnnnnnnnnnnnnnnnnnnnnnnnnnnnnnnnnnnnnnnnnnnnnnnnnnnnnnnnnnnnnnnnnnnnnnnnnnnnnnnnnnnnnnnnnnnnnnnnnnnnnnnnnnnnnnnnnnnnnnnnnnnnnnnnnnnnnnnnnnnnnnnnnnnnnnnnnnnnnnnnnnnnnnnnnnnnnnnnnnnnnnnnnnnnnnnnnnnnnnnnnnnnnnnnnnnnnnnnnnnnnnnnnnnnnnnnnnnnnnnnnnnnnnnnnnnnnnnnnnnnnnnnnnnnnnnnnnnnnnnnnnnnnnnnnnnnnnnnnnnnnnnnnnnnnnnnnnnnnnnnnnnnnnnnnnnnnnnnnnnnnnnnnnnnnnnnnnnnnnnnnnnnnnnnnnnnnnnnnnnnnnnnnnnnnnnnnnnnnnnnnnnnnnnnnnnnnnnnnnnnnnnnnnnnnnnnnnnnnnnnnnnnnnnnnnnnnnnnnnnnnnnnnnnnnnnnnnnnnnnnnnnnnnnnnnnnnnnnnnnnnnnnnnnnnnnnnnnnnnnnnnnnnnnnnnnnnnnnnnnnnnnnnnnnnnnnnnnnnnnnnnnnnnnnnnnnnnnnnnnnnnnnnnnnnnnnnnnnnnnnnnnnnnnnnnnnnnnnnnnnnnnnnnnnnnnnnnnnnnnnnnnnnnnnnnnnnnnnnnnnnnnnnnnnnnnnnnnnnnnnnnnnnnnnnnnnnnnnnnnnnnnnnnnnnnnnnnnnnnnnnnnnnnnnnnnnnnnnnnnnnnnnnnnnnnnnnnnnnnnnnnnnnnnnnnnnnnnnnnnnnnnnnnnnnnnnnnnnnnnnnnnnnnnnnnnnnnnnnnnnnnnnnnnnnnnnnnnnnnnnnnnnnnnnnnnnnnnnnnnnnnnnnnnnnnnnnnnnnnnnnnnnnnnnnnnnnnnnnnnnnnnnnnnnnnnnnnnnnnnnnnnnnnnnnnnnnnnnnnnnnnnnnnnnnnnnnnnnnnnnnnnnnnnnnnnnnnnnnnnnnnnnnnnnnnnnnnnnnnnnnnnnnnnnnnnnnnnnnnnnnnnnnnnnnnnnnnnnnnnnnnnnnnnnnnnnnnnnnnnnnnnnnnnnnnnnnnnnnnnnnnnnnnnnnnnnnnnnnnnnnnnnnnnnnnnnnnnnnnnnnnnnnnnnnnnnnnnnnnnnnnnnnnnnnnnnnnnnnnnnnnnnnnnnnnnnnnnnnnnnnnnnnnnnnnnnnnnnnnnnnnnnnnnnnnnnnnnnnnnnnnnnnnnnnnnnnnnnnnnnnnnnnnnnnnnnnnnnnnnnnnnnnnnnnnnnnnnnnnnnnnnnnnnnnnnnnnnnnnnnnnnnnnnnnnnnnnnnnnnnnnnnnnnnnnnnnnnnnnnnnnnnnnnnnnnnnnnnnnnnnnnnnnnnnnnnnnnnnnnnnnnnnnnnnnnnnnnnnnnnnnnnnnnnnnnnnnnnnnnnnnnnnnnnnnnnnnnnnnnnnnnnnnnnnnnnnnnnnnnnnnnnnnnnnnnnnnnnnnnnnnnnnnnnnnnnnnnnnnnnnnnnnnnnnnnnnnnnnnnnnnnnnnnnnnnnnnnnnnnnnnnnnnnnnnnnnnnnnnnnnnnnnnnnnnnnnnnnnnnnnnnnnnnnnnnnnnnnnnnnnnnnnnnnnnnnnnnnnnnnnnnnnnnnnnnnnnnnnnnnnnnnnnnnnnnnnnnnnnnnnnnnnnnnnnnnnnnnnnnnnnnnnnnnnnnnnnnnnnnnnnnnnnnnnnnnnnnnnnnnnnnnnnnnnnnnnnnnnnnnnnnnnnnnnnnnnnnnnnnnnnnnnnnnnnnnnnnnnnnnnnnnnnnnnnnnnnnnnnnnnnnnnnnnnnnnnnnnnnnnnnnnnnnnnnnnnnnnnnnnnnnnnnnnnnnnnnnnnnnnnnnnnnnnnnnnnnnnnnnnnnnnnnnnnnnnnnnnnnnnnnnnnnnnnnnnnnnnnnnnnnnnnnnnnnnnnnnnnnnnnnnnnnnnnnnnnnnnnnnnnnnnnnnnnnnnnnnnnnnnnnnnnnnnnnnnnnnnnnnnnnnnnnnnnnnnnnnnnnnnnnnnnnnnnnnnnnnnnnnnnnnnnnnnnnnnnnnnnnnnnnnnnnnnnnnnnnnnnnnnnnnnnnnnnnnnnnnnnnnnnnnnnnnnnnnnnnnnnnnnnnnnnnnnnnnnnnnnnnnnnnnnnnnnnnnnnnnnnnnnnnnnnnnnnnnnnnnnnnnnnnnnnnnnnnnnnnnnnnnnnnnnnnnnnnnnnnnnnnnnnnnnnnnnnnnnnnnnnnnnnnnnnnnnnnnnnnnnnnnnnnnnnnnnnnnnnnnnnnnnnnnnnnnnnnnnnnnnnnnnnnnnnnnnnnnnnnnnnnnnnnnnnnnnnnnnnnnnnnnnnnnnnnnnnnnnnnnnnnnnnnnnnnnnnnnnnnnnnnnnnnnnnnnnnnnnnnnnnnnnnnnnnnnnnnnnnnnnnnnnnnnnnnnnnnnnnnnnnnnnnnnnnnnnnnnnnnnnnnnnnnnnnnnnnnnnnnnnnnnnnnnnnnnnnnnnnnnnnnnnnnnnnnnnnnnnnnnnnnnnnnnnnnnnnnnnnnnnnnnnnnnnnnnnnnnnnnnnnnnnnnnnnnnnnnnnnnnnnnnnnnnnnnnnnnnnnnnnnnnnnnnnnnnnnnnnnnnnnnnnnnnnnnnnnnnnacctggagccgcacgtttgggcgccacctgccccggccctcggggctccggtaattcctgagtccaaggtggatcacgcctgcaaataatgggcaagaaagaaagagcgggacccagcagcagagaaaaaggaagtggggggagggatgagttcattctggtcaggcagggattctgaatctcctgtgtttatctcaggcactaactaaggaaatgggagaggggataggtgttagttgcttctcaggcagatatccggaatctcctgtgataagctagactttctggcatctaactaggtatggggtcgccaaggctggcttctgacaccttagaaagttggtctcctgcagtcttattaggtaaggctttccatgcttgaccagcagccactgagatctgtgcatatacagcagggtcataaagaatctgctggcctagacctacataggctcccctgccagtaagcatttctaagttccttcaaagaaaaccagcagctgtgttgtgctgcactgtttgattacaaagttcttggtattcacccctccagatcaagtaatctccccctgatagcgtagctctacataattgctgccagtcactgggggtgcaattcaaggccgaaaaagattcaaaaatatccagagtaaaaggggcatgaggcctgtatgccacaactgcctcctttagttgttttatatccttaaaagttaagcggggcatgctctctctgactctggccttggggattaattgtctctataactgggaatatcactccacccctctgctcttcaggaggggctgaaggaagacagagagagctagaatgctcgggattatgagcagggggacgtggctcaagggaacatctcctaagcttaggctttaatttgaggatgtccttcttgaattgaagtgcttcaccctccttagtctcatcccctgaagagtagagagagaactcagaggaagaaacatcagaagcttggagtgacataacagacagatctttgtcctgagcctctgcaaaagcagctttggcttcctcaacctgctctttcacctccacattatcactaagaagtgcttccttgacttgacgccacagagaaaaagtaacaattgatatggcatcttccccttctttttgtaatatccttagtgggtctcccttcacctgctcccaatcagggatattaaagtcaccaaacaccaaaaaccaagggctgacctcatgttcagttttcaagaagccttttgctgtcttatgtttgataccggtgccctgcttttttaacaattggaccagttggtcccccataagagagtaagaactagcagcacccatattcaatacacccactccttacctttttgaaaatgctggccagctttcatgggtgattcttcagtgtcttcccttcttccccatctcggtgaaatctccacttgtagtgcctgcactacaacacttccacagtatagggcaagggacttgaggatttaaataaagacaagacagcagatctttcttgcagggagagaatgctctctattccaacaagagtgggggcttatataccagtcagcagggatggtggaaaactacccagataacaagttcaggttcccaggcccatcaggcaatcctgaatgggtgaacaacaggacaacaggaacttgcactcaggccttcaaggaaggaagaaaacaggatgtaactgctaggtaagctcctagtcacaagctggtaagcagacccctatgggggaagggcccaacacccatgggccgggacaaagtgcatgattttcttcagcaataagttcttactgtctaccagttggggtgagggtagaccaaggacaatagcaatagcctataacagccttgaccaacaactcaaaagagaccttctcatgcctggtgttgggatttttattagtctttggttcttagagggaccactgtcagcccactgggaaaatttcatttaaattatatatgtgtgtttatacacagacttacatgttttataggtttgtttgggttctttttaaatagatagttaatagtaccttataaaattttcagacatcattactgttattttaacctcctatcttcttcttctgtatttagttcctctgccctaagtagagtccccattgttaggtcttaagtgagccctaaaaatggcagtgctgctgtcctaagttgggtaaacagacagattgttattggataaacagaaaactaggctcacattcccctgagttcttgtaaggtgggattctgtttaccaggaaattcaataccaccctgatccacctccaaaagggcatctagttcctgattagaccaaaaaagcctgcaacagttcaatgtcttcatgctaaccccaagactactatgattcatgagtcttctaccactataaccttcccaacaaaactgacaaggcttttccctatggctgctgtcctctattcttggagaccacctggtcatttgttccctcaagaaacttgtcattttacccacaaacagacagatggtttgtggtttcactgaaccttcatttacagccattttcccaatgcttggttaaggttactattgctgtgatgaaacaccatgaccaaaaccaaattggggaagaaaaggtttattttgctcacagttccatttatagttcatcatccaaaggagtgatagcaagaaatcatgcagggcaggagctgatgaactggccatggaggggtgctgcttactggcttattcatcatagcttactcaacattttgtttctttttcagtgctcttaagatttatttattgtgtatacagtgctctgtctgaatatatcacaggccataagagagtaccagatcacattacagatgtttatgagccaccatgtggtttatgtgaattgaactcaggacctccagtagagcagccagtgcacttaacctctgagacatctcttcagtcccatccttttttatagaatccagaactactagcccagggatagcaccacctataatgggctgggccctcccccgtcaaacactaattaagaaaatgccctacagacttacctatagccagatcttgtggaggcatttttctaaattgacttaatgactttagcttgtatcaacttgccataaaactatctagcacaatgttacgataaatctttctgtcaccagcttgagttctgcctgccacatgggtggccaaaataatacacagagacttatattaggtacaaatgctgcttggccaatgactaggatttctcacctgctagctcattcttaattatcataaatctatatattttataagacttatcttattggacgccagtggcaagcatcctgtattcctgggctcatctgatgactctggaggaagagagaaggggcccaattccttcttgcccttgtatttatttatttatttatttttggttttttgagacagggtttctctgtgtagctttggagcctatcctggcactcgctctggagaccaggctggcctcaaactcacagagatctgcctgcctctgtctcctgagttctgggattaaaggtgtgtgccactaatgcccagctcttgcccttgtttagatgagtctccctgctatgtcatttcctgcctggatcaccacttctttactacattttccagaatcctacttgactcctagtcccgcctaatgtgctgcctcattggccaaacagtactttatttatcatccaataagacaagcacacagatgcacttccctcatcatctcctcttttctttctaaataaaaagaaggataacttaccttttataataactgaagaaaactataatcataactatctgtcttcaactccatcaaaggccacagaaggatagcatataaactctagaattgacagagatatcttgctacctggacagtcaccccagatgcacttccctcatcatctcctcttttctttctaaataaaaagaaggataacttaccttttataataactgaagaaaactataatcataactatctgtcttcaactccatcaaaggccacagaaggatagcatataaactctagaattgacagagatatcttgctacctggacagtcacccaaagatcctctataacgttggggcatccataggccatagtgtgtctggactcttctccatttccaacaggatcccttcaggactgtcttgttttgtaagttcagcagtcactttcttgtgggtcctgcatgtccagtttatacagcaacaaacagtccaggcaagagcagtttcttgcccaaatggctaatcttgccatgttgaaagcaaactccataacgagtttcttcgttatccacccttctttctgacgtaattggtgtgctaggagcaattgtgtctcactgccaagaaaacactaaaccatttaaatgccatattttctgtaggtctttgaaaggtttgaagaaaacctattcatctcaaatacatctctgtatatctagaaaacctaactaacctaattataagttctgactattataggtaactatataacatgtatttaattatgcatatcattttaaaagatctgtataaacataatacctaaacaagaggagacgtatacatatcacaaaattgaccttaacgttgtatcaataaatgaaaatccatactccggctccacaaagtattcattcttatatcctatttccccctttttttgttttaaaaaagagattgactatgctcattaccgtttataaccaaccccatttaaatgaaagcaatttataaacaatatttgggaatttgggcgtcattcattccaaactgcttcctgctgattgggggcatgtccataccatggggatcatgataaaacacagaaatctgaccaagtccttgtttttgtagtctgcaaggctgcatcgtctcagctgttttgaatgtaggataagttgggtcactgcttcaaggggtcttacttgatcaaaccacatttgtctggaaggaatccacagcttttcattttctgtggaaacacaagcaaaaacttttttcccaagtagcctgtccttagacttaaattttgaagtcaaagcatttttaaaatatataagttgtattaatttagcagcacttataatcaaatgtattttagcagcagtaactctttccttggcaatcaaacaatttaaagataacaatagcaaatagtatccaaactctctgtgtatttttcatctttaggtggcttcctgataatacaaaattagctttactgtttatacaattacaggaaacaatcagaaacagaagtaatcctctatacattacacatgttggatcccatgcaggtctgccaggcaaactaacacaaggcaatgataaaattgatcattgattaattggaagtgtgctagaagcctcagaatttcataagaaacatcatgtaaatagcaaagnnnnnnnnnnnnnnnnnnnnnnnnnnnnnnnnnnnnnnnnnnnnnnnnnnnnnnnnnnnnnnnnnnnnnnnnnnnnnnnnnnnnnnnnnnnnnnnnnnnnnnnnnnnnnnnnnnnnnnnnnnnnnnnnnnnnnnnnnnnnnnnnnnnnnnnnnnnnnnnnnnnntcctcttcttagtctccccattctgccttataataaacttatagtcttaagtctcatgtctcagcaatttctcttttcttctttttaaacaaggccaattcagttattacacacctgctagaggtgatggcagttatgggtatatctgcacaaataaaaactgacaatcctccagcatatgtctccacaaaattggaacagtttttcaaatattataacataaagcatgtcactggtataccacacaatcctatggggcaagcagtggttgagagatctaatagaacacttaaggagatgctccatagtcaggctgggaaaacaaacccccaaacacaggttgcataatgctttactaacactaaactttcttaatgccgatgagaaaagacaaacagctgcagaaagacactggactatggaaaaaactgctgaactgaatcagctagtatacttcaaagatgtactaacctctgtatggaaaccaggacatgtgttacattggggtcggggttttgcattggtttccacaagagaagaaaaactttggataccatcaaagttgttcaagattcgagttgaaaaggaaaaacctctcgatgaggagaaatgataggtattctactaaggtatatttcataaactaaatagtaatctcccttaatgaaagagaagtgttttgtttttatcttcacaggaaaactcatctccagaagtcaaaggacacttcatggatagatacataagaagagaaggtagctataaccagcaaacaaaaggaacatgccatacagtaaactttatagctgtctctcagagaactctatttctctttatttcctagtccctattcaattaaatcaatgctggatttagaggtgaatttggctttcctcctctaaaatccaagcacattctttaactaaactttagagtttctgtattatatcaagaataagggaagaatttgggaacagtctttgtcttttcttggctctttccttcaaggtgtataccctctcataattattattttctcatgattgcctttcctggtatgcatacatatacaagtaaacatttctctgctaacatttatgtttgagtcccacacagccaatgaagacccacctgacagcaatccctggatgctctggaaaagaaattgggccatacctcctcgactgcactggatccaacttactccatttcaactgacacattcattctgttatattgttaatatttgtacttaaatcaaaagagctaaaatttaagatcacagccataagttccatatgttaataaaaagtttgagctgtttatttcttatactacagtaagacaatgacccaagtttaacaaagggcttaaaataactgctaaccccatgggtctcaattctttagagttttaaaaacaaaactcctttataagggtagcctaggaccacctgtatgtcaaatgtttacattgataacaacaaaaaattttaaaaacttaaaacatcaaatttttaaaggtaaacctgacaatataaagtcttagttttataaaagctgataacctgttacaagatgttaaaaaaatacaagttactagccattcttataaattaacaagtagccagacttacctaggcagacttctaatactacaaagatctgcagaatatggcatttaaaatgttaactaaaaagtttataatatcagacagagaattccaattccagatcctgacagtgacccaaggtctctaaagaagattatggggctccatagattgtgacaatgctgaccattgagcataaagctcagatactatacctactaccaggcaggactgggctcagagtgtggacaggctacagaacactggagaattgattgcaccacctttgcctagacaaaataaggtcagtcttttccatgtccctcttccacagagagaaaaaactctcattttaaggacctggcaaagatttacttctgtccccaacactattgagacttgagtatggctaactttacgtggaccaaggggggggggttggtttttgagacagggtttctctgtgtagctttggagactatcctggtgctcgctccggagaccaggctggcctcaaactcacagaaatctgcctgcctctgcctccccagtgctgagattaaaggcgtgcaccaccaacgcctggttgcttctttatttatacataattcattaagaagggatgtattcatgttgttctaaaatatagatggtatcgattctgattttggacatgtgtttgacttcctcttacatatctctcagtcatcattgataaactgtggcaaaacagtgttatcttttacaatcgttttttactcatcaaccccataactaaacttttaagactctagaggcatatgacagcctattcccaggctggcaactcttgaggattcaaggacactagacagaaagaaaatctccaagccagcccaagtagatttccatgtcctgagcaatgtattattaactattaatgattagagtgtcaatagtcccaagaaaaattctcaggccaaagctgctgcagttactattcagtaacaactatattttatatctttatagaatttatttacatgtctaatcctggcattcttttgttgcttggtcatatgacaccacgttggctctgcaggagttaagaaactaacttttcgaagaaagggaggtcctgacacctcattctttgttttgttgtgttcaaattctgaacccccaaatcaccaagagatccattctgatgcaaaagcaaaagatcttttattatttaaccagttaactgtcttaacttggttctctcatctgtccaacacagcagttggtgtgagaaggacccaaaggggccaaaggcagggaaattattggggagaacaaggggagtgtctaggggtacacaacagtctcaagactggtgcacttctgggtttgggggacttctcctatgttgattggttaactggttgttatggcctataggccctcccagggtggttgctatgcacatcactgttattccacttttactgtaaagcatgtccagagcctgccagctaacttctgattggtttcttgccacatggagggtatctgacctcctagtgactagggcagttccaacaaggtcagaagggtggaaatttagcaacatgtgctgaatcagaggcctacatgttgctgggtcttttctgcagcctgtcatggctgttaaagcagggggatgggtaagttgtctggtcccttcagcttgtttatttggttggtttgctttgctttttgagacagggtttctctgtagctttggaggctgtcctggaactcattcagtagactagactagccttgaactcagagatctgcctgtctctacctacacagtgttgggttgccaccactacctggcaacacttcattcttttattgtctttccataccattccttgcctgtcaatataaggccctgtgtaggacacaggtaacttcatctcatctatctttgttgctgtatatgccacataattgcctgagtgtatagtaggaaaagacttgtaatctgatctgtagccatctcctctagcctagtgaatcctgttgacctttttaagttcactttgctttgattatcttgttcctgagtaagtgttgtagcagatattttaagagtatctcagagactaataaagagatctttggatgttttgtggggagtttgagacaaggtatctctgtgtatctctggctgtccaggaattcactctgtagactaggctggcctcaagatttgtctgtctctgcctccagagtgctaggattaaaggcatgcgatatcactggctgactgatctctggcttctttatgtgcatcacaaccttcaaggcattaaggaagatcttcaagtagataagaatatctccctaaaagtgataggggttgtgtgcttaggactttcctgagaaaattaaaagcataatgaacaaatataaaaagcccctccagtatgcaacctgcagagaacaaaatgaaaagtgaaagacagtcacagcagcgatcgtgtggctcagcttttctgggtctttgtcactcagctgtgctggctttatgatttttgccattcctataagatatggctgtatcaccacatcatagattttgatgaaaaaataacataaaccaggcagtggtgatgcatacctttaatcccagcacttgggaggtaaaggctggtggatctttgtgagtttgaggccagcctggtctacaatgcaagttccaggacagctagaactgttacacagagaaactctgtctggggttcagaggaggaacattataaatgaaaatgttctcctccatcaagtatgtgagatatgacacattagtgacagcccaacagataaaggtatgctggtcaatgaaacatcagacaatggagtccaggtgtgtgcaaccatttgtaggatgtccaatgaattggaaccaagcatccagggagtctcccaatgaccctgcaagcactgtgcagaccttggaactgttctgtcacattggcaacagtggcccactgcaatgtggcctgctttatgtggcagctgatgggtgatgggaagaaagtcaattccctggcagacagccaaatccttccaagcaagttcaagccaggaagtgctggccaacttatcagtgttggaaggaaggagacagctgaggttcactcactgcagtgcattggagcccatatgactactgtgccaggtggccacagcaagtgacactaccctgaaaggctgggacacatggaatatgaaccagatatactgcttagagaacatctatgggcagcttgtgtgttgaccttgacttcaatgccaacaaacagtattatctcaccagctgcagaagtgactacaaagtaaagttctgggacacatggaatgccacttagcccatgaagaccttataagatcactcttactgggtatggagcatctgctacaatccctctcatgactagctagctggtcctcactgacagcagggtcagcagtgtcttcctgtttaacaaggtgtctatttcctctggtgtataatcatgatgtcatcacacacacacacacacacacacacacacacacacacacacacacacgctgagaagtgtaaggaacccttgcgggacaatattattgccacttttgaggcacacgaagacagtatgtaccctttggattgggcctcagatgacctaaggctgttttcttccctgagttgtgacaggaggccaattatcaacagagtcccaaagcacttaaatatcacatactgctctggcggcccatggtactgctgattggtacttggcagattctcagaaatctgcagctgtgagataattccctttgtagacagatccctctatgggagaaccaacattgcttccaacaggagctctaggggaaacagctgagcttctaccggaggctcagctgaagttgtcatcactgtgaagaatctgcctaactccattttgaaagcaggagacattatgctgcattgttaaaaataaatttctattattgtaagagttgagttgctctctgtttcccggaacctgactttacccaaccgatgaccttgacttgcttttgaggatagtcttaccctccctagacgctcccaaattgcatggtgatcatatgatttttttaaagattttttttgtatttccttattgtcctattgtctcccatctataaactactcatgattttactccttaaaaggggcccaagacatggattctaggctgctctctttaacccagcttaggaggcaatagttagccagatcttgcatgtaccccaataaaaaaaatcaagcttacctcaaatttgactcaaattgtgacggtggtcttattcttgcctttggaattagcattttctggagagccccagtgagattcaaaccacccaccaaaattctaaacctggaccttcaccctggaactccaaaaggctaggagagctacctcaggaggcacatgccttaagatgttccaaggctgcaagactgccttcagttctagtaatatagggtaaactttcatgctgagaaatgcagcaagcatcaatggaggcctcctggtgagttacagtctggttctgttttgtgggattcctacctaggatgtggaatctccctttctctgccagagatctctataactggaagaaccagaactcacctttcagcactagccccaagtacttagtttctctaatactgtctttaaaatcatttccctacatgagacgacagtcagcagattctctgtaccctctttgttgttcttttgtttaaattacattgtgtgatcaagatggaacatgaaccaagagattcattaaccatgaagtttattaaaggggggagcaagaagggagtgaagatagagagaaagagggggacaaaagacgagagaggagggggcaaaaggagaggaaagagcagaaagagaggagagctggaaagagcagaagcatgtaagtgggccggggtctgtcttttaaaggggtcctttgtacctgcttgcagactagtactcatggaaccctggattgaccaggctactgcctgagtgcattctgccaggtgacaggggcaggcctgtaaggagccgttacatatcccccttttttattaattaatgataaggcttcttatttttacaagcaagtaggtcacccatacattgagggatagagacagaggttgtacctcccaaatcatacaataagactgtgtacgagagtcaccactaggctgttagcttgacccaaagcgctctcgacctatcctccgccgtttttctgggaaagggaaactggggcaggcaacccttatgcaggacaacatgcctcccagagaagcctgcatattaggcaactctctgtgcgatgctttgctcgacatccctcatgggctgctcaagccagacaccctactctgtgcaatgagcctaggctccgggtgtccaagagctgtctggccggtggcctattgcttaagcattgctaaccaaatgtcagtggaagccccttgttccaaggctacaagcgcttggnnnnnnnnnnnnnnnnnnnnnnnnnnnnnnnnnnnnnnnnnnnnnnnnnnnnnnnnnnnnnnnnnnnnnnnnnnnnnnnnnnnnnnnnnnnnnnnnnnnnnnnnnnnnnnnnnnnnnnnnnnnnnnnnnnnnnnnnnnnnnnnnnnnnnnnnnnnnnnnnnnnnnnnnnnnnnnnnnnnnnnnnnnnnnnnnnnnnnnnnnnnnnnnnnnnnnnnnnnnnnnnnnnnnnnnnnnnnnnnnnnnnnnnnnnnnnnnnnnnnnnnnnnnnnnnnnnnnnnnnnnnnnnnngttggttcattttccataatatgtccaattgtttgtttttttgtttttttttttttctgccctcaaagacaggaaaagcgaggcacagctttctttttaccttttctggaagaaaggaataagacttcaggcgcgtctcatagggagggggcgccgaaggagcaacctgtgagagggctgtttgaagctgccgtcttcgaagttttttgctactttgtatatggtcatccagatggtatctttctttctcatatttagcagcttcctcacctagctcagcttctaagacttcatctcctgagctttcagagtcatcagagctatcaagatttaaggcttcaagctcatgtacaggatctgacaaatacactcccttgtcattagacacactgggaggtcctttttcattttttattgccgttttgtttcttgcatacactcccttgtcattagacacccggggaggtcctttttccttttttgttgccttttcttttcttacatacagccagtcagagagtaacacttccgaggcggcggttgccagcctatataagggatgggtttttgggagttcagagtctccactctgtaagcttatgctctccctctcaagacgcattaaagctttactgcagaaggatcctgaggagtgtgccgcatcatttttgctggcgagtcggttagcgcgggacacaggccagcataatttgcctgaattcttacattcccacctttacttattattaaaaaggtgaagagtccagcatggcagattagggataaggacaccgagttctcaagactacttcctgctgatctggggggagttgaccatctttgggtgacccaagaaagcatcctgttttctagtcctggattacagccctagccataccccactggcataaaaaacacaagctcttacacctgaggtttttccactatgttgtaagtctgtatataaggatgctccctccctgcaaaagagacagaggtccacacacattctcctagcacaaacaaccagacatctctgcttttaactaaatcttcaagctttaccccaataccttggacttgctcgtggggtgggcgccacaagggaggacaaggttaagtttagagaaaaaaattcttagatccggtacttgaagggaggattgtaagattagggaggagttccccagggggtcccaagatgagggaagggagtcccaggaccagggaaaggttgaataatatctggagtgaatctgacctgtttgggtgggtccaattcagctccctagaacttacaagaatcctttgagtttgtgaaaacataaattttagacatattagcagtatactcatgtcagaaatgatttggctaaaacattaacacttttaaaactgacagatatctttagaacaatgaaaagcaccttaatcttgagcttgtagatacagttatgatggcataatatggtgtttagtactctgtcagagttggattagtagcttatcagaactgtatttgaagggaccagccccccttttcggcagccatgatagtaacacgtgctcgctatgaccttgccttagtcactagaggttaggtgcctgcctcgtgacaaggaaccaatcagaagttagctggtggtgatannnnnnnnnnnnnnnnnnnnnnnnnnnnnnnnnnnnnnnnnnnnnnnnnnnnnnnnnnnnnnnnnnnnnnnnnnnnnnnnnnnnnnnnnnnnnnnnnnnnnnnnnnnnnnnnnnnnnnnnnnnnnnnnnnnnnnnnnnnnnnnnnnnnnnnnnnnnnnnnnnnnnnnnnnnnnnnnnnnnnnnnnnnnnnnnnnnnnnnnnnnnnnnnnnnnnnnnnnnnnnnnnnnnnnnggctctgtgtctcatttgaaccatccaatagaaatgattctgtatttcgcctcatttgaaagactctgtgtttcacctcatttgaataactctgtactgcgcctcatttgaataaccctgtatagcgcctcatttacattgaccaatgggaatagctctgtacaatgcctcattagaattatccaatagaatccctgcttctaacttgcgcccttttccctatataaggacccctttcccttggctcggcgcgcttggcctcacagaagctaagtcgcccgggtacccgtatctccaataaagcctcttgcggttttgcatccaagttcgtggtttcgctgattcctgggtgtgggtctccttctacgaaagtacctcttcgggggtctttcacttttcgactctgggtgtgctttacggataagcgcacagcaatgacatgcagagcacagcaaccaccctgggagggcctatgggccataacaaccaattgaccaatcaacacagggcaagccctctaagcctggaggcacaccaatcctgagtctgtgcatacctgtagacacttccccttacactgccctacaagattgctcggcagctggttcaaggggtctttgctagtcatccaccacggtgggtgggtgaaagacccgagctaacatggggttagctcattaaaaaccaataaagcctcatgcagtttgcatcaagctctcgaatctgcctggtgattggggtgacctcggtcgtggcctgggaccccagatatctgagtttttccgggggtctaacaattgactaacgttaagactatgaacaatagcataaatgagaaaggaatctgataacttgcatttgtacaccttaagtaagcttgttataccttaaaactttttttttaaaacaaagaaatgataagaagttatactgaaaccagcagccgtcaaactgcatcagagttcttgagaagggtgaaattttacctgaattaattattacagaatgagcgagactggctatctggccacatggacagccacctccaaggtcctctatagttgttgagggcagaggctttaaggacacctgccttctgctgatagcatgagacctgtggattaggagctgtaggaagacttgcctaccattggcccaagcaactggagaaagtaatttacactgtcctcttggccacagtccaaagaatcctttgcagcaattgaggtgaaaggcaagattgctcggtggctaacgttaccacttttgtgggtggagtttcttcagtgtccagtgtttggaggaaatgggctgatgccagcagttggcctgtctcgctgttataaaaagcttttaaataaaacattttaaatgccatattctctagatctctgagcatttcagggctgtttgtctgtttagtatatctcagcagacaaaatttgtctttagttacttgccttaagcacatagatggctaggtaagactttatccttgtaattaatttgtatggctacagattagtatggctacaatgacattagggtaggatctgcctggagaactggaatgaagctgagaggctgtggaaggatgttttacttagagccctgtagcctgactgtaactggttttaacttagtgggttagatttacacttctaaaagacaaagaagtagagaaaagtccccttttgtaatagaagcttaaccttcgtaaactgtttacaggaaggactgggtggtataaatattttgttaatttaaaatagacctttataaccttaaatgtttaccatcatttaaagatacacaacaatttagaaatatttgagactgaaagaccccaactcaaacccaacctgatatctaccaacatgtatttgaaaatcaccctggccacatatacacagctctggggaaaaataacacatgaaatggtcagtcatgatgaccagtctcttgacccgtccagcaggccaggttattcgcgggtctcgagggggttgtcacctaaaggggtcatgagggcgagagaggaggagaccaagcggcgcaagaaaggacaagagtccgtctgtgcaatgtcaaggtctcgtttattgaaaggtaaagcttgcttatatgcaggggatttttactcagggcggggtaagggagcaggaggaatggaaaattttcaagaggaaatagaggcgaggtaaatcttagcccatggtcccattgttagcgaaccgcagctatttctgagaaaagggagaacattttgcaacatgtattgtgcagcttaaccggaaaaaacatcttgtagtcgaagcgattctggtcatctaacaatgattaactcttgattcagtatgaggccccttttggccttcgacatctcccccttctgtatacaaaaagggatgatgaatcttattatcaagagagcccctgtcttaggccgcataggctgcgcccctggacaggcaacgtgccttgttgagccggtcttgacgacctctgtacgttgttgccccctgttccaggacctatgcatactcccgtcattgagtactcccttgctgcatcaatcttgagttattaaccctgagtccttgattactgaacctgagctcttgctgcgaccctcgctcctcccccgggtcagctgctactaatttgtggtaatggaccgaaatacttttaggtaaggccgaatcaatttgtcttttaataagctgggttagccgttgaagggcccatgggccaaaagaaagaagcaataggaaaacaattaagnnnnnnnnnnnnnnnnnnnnnnnnnnnnnnnnnnnnnnnnnnnnnnnnnnnnnnnnnnnnnnnnnnnnnnnnnnnnnnnnnnnnnnnnnnnnnnnnnnnnnnnnnnnnnnnnnnnnnnnnnnnnnnnnnnnnnnnnnnnnnnnnnnnnnnnnnnnnnnnnnnnnnnnnnnnnnnnnnnnnnnnnnnnnnnnnnnnnnnnnnnnnnnnnnnnnnnnnnnnnnnnnnnnnnnnnnnnnnnnnnnnnnnnnnnnnnnnnnnnnnnnnnnnnnnnnnnnnnnnnnnnnnnnnnnnnnnnnnnnnnnnnnnnnnnnnnnnnnnnnnnnnnnnnnnnnnnnnnnnnnnnnnnnnnnnnnnnnnnnnnnnnnnnnnnnnnnnnnnnnnnnnnnnnnnnnnnnnnnnnnnnnnnnnnnnnnnnnnnnnnnnnnnnnnnnnnnnnnnnnnnnnnnnnnnnnnnnnnnnnnnnnnnnnnnnnnnnnnnnnnnnnnnnnnnnnnnnnnnnnnnnnnnnnnnnnnnnnnnnnnnnnnnnnnnnnnnnnnnnnnnnnnnnnnnnnnnnnnnnnnnnnnnnnnnnnnnnnnnnnnnnnnnnnnnnnnnnnnnnnnnnnnnnnnnnnnnnnnnnnnnnnnnnnnnnnnnnnnnnnnnnnnnnnnnnnnnnnnnnnnnnnnnnnnnnnnnnnnnnnnnnnnnnnnnnnnnnnnnnnnnnnnnnnnnnnnnnnnnnnnnnnnnnnnnnnnnnnnnnnnnnnnnnnnnnnnnnnnnnnnnnnnnnnnnnnnnnnnnnnnnnnnnnnnnnnnnnnnnnnnnnnnnnnnnnnnnnnnnnnnnnnnnnnnnnnnnnnnnnnnnnnnnnnnnnnnnnnnnnnnnnnnnnnnnnnnnnnnnnnnnnnnnnnnnnnnnnnnnnnnnnnnnnnnnnnnnnnnnnnnnnnnnnnnnnnnnnnnnnnnnnnnnnnnnnnnnnnnnnnnnnnnnnnnnnnnnnnnnnnnnnnnnnnnnnnnnnnnnnnnnnnnnnnnnnnnnnnnnnnnnnnnnnnnnnnnnnnnnnnnnnnnnnnnnnnnnnnnnnnnnnnnnnnnnnnnnnnnnnnnnnnnnnnnnnnnnnnnnnnnnnnnnnnnnnnnnnnnnnnnnnnnnnnnnnnnnnnnnnnnnnnnnnnnnnnnnnnnnnnnnnnnnnnnnnnnnnnnnnnnnnnnnnnnnnnnnnnnnnnnnnnnnnnnnnnnnnnnnnnnnnnnnnnnnnnnnnnnnnnnnnnnnnnnnnnnnnnnnnnnnnnnnnnnnnnnnnnnnnnnnnnnnnnnnnnnnnnnnnnnnnnnnnnnnnnnnnnnnnnnnnnnnnnnnnnnnnnnnnnnnnnnnnnnnnnnnnnnnnnnnnnnnnnnnnnnnnnnnnnnnnnnnnnnnnnnnnnnnnnnnnnnnnnnnnnnnnnnnnnnnnnnnnnnnnnnnnnnnnnnnnnnnnnnnnnnnnnnnnnnnnnnnnnnnnnnnnnnnnnnnnnnnnnnnnnnnnnnnnnnnnnnnnnnnnnnnnnnnnnnnnnnnnnnnnnnnnnnnnnnnnnnnnnnnnnnnnnnnnnnnnnnnnnnnnnnnnnnnnnnnnnnnnnnnnnnnnnnnnnnnnnnnnnnnnnnnnnnnnnnnnnnnnnnnnnnnnnnnnnnnnnnnnnnnnnnnnnnnnnnnnnnnnnnnnnnnnnnnnnnnnnnnnnnnnnnnnnnnnnnnnnnnnnnnnnnnnnnnnnnnnnnnnnnnnnnnnnnnnnnnnnnnnnnnnnnnnnnnnnnnnnnnnnnnnnnnnnnnnnnnnnnnnnnnnnnnnnnnnnnnnnnnnnnnnnnnnnnnnnnnnnnnnnnnnnnnnnnnnnnnnnnnnnnnnnnnnnnnnnnnnnnnnnnnnnnnnnnnnnnnnnnnnnnnnnnnnnnnnnnnnnnnnnnnnnnnnnnnnnnnnnnnnnnnnnnnnnnnnnnnnnnnnnnnnnnnnnnnnnnnnnnnnnnnnnnnnnnnnnnnnnnnnnnnnnnnnnnnnnnnnnnnnnnnnnnnnnnnnnnnnnnnnnnnnnnnnnnnnnnnnnnnnnnnnnnnnnnnnnnnnnnnnnnnnnnnnnnnnnnnnnnnnnnnnnnnnnnnnnnnnnnnnnnnnnnnnnnnnnnnnnnnnnnnnnnnnnnnnnnnnnnnnnnnnnnnnnnnnnnnnnnnnnnnnnnnnnnnnnnnnnnnnnnnnnnnnnnnnnnnnnnnnnnnnnnnnnnnnnnnnnnnnnnnnnnnnnnnnnnnnnnnnnnnnnnnnnnnnnnnnnnnnnnnnnnnnnnnnnnnnnnnnnnnnnnnnnnnnnnnnnnnnnnnnnnnnnnnnnnnnnnnnnnnnnnnnnnnnnnnnnnnnnnnnnnnnnnnnnnnnnnnnnnnnnnnnnnnnnnnnnnnnnnnnnnnnnnnnnnnnnnnnnnnnnnnnnnnnnnnnnnnnnnnnnnnnnnnnnnnnnnnnnnnnnnnnnnnnnnnnnnnnnnnnnnnnnnnnnnnnnnnnnnnnnnnnnnnnnnnnnnnnnnnnnnnnnnnnnnnnnnnnnnnnnnnnnnnnnnnnnnnnnnnnnnnnnnnnnnnnnnnnnnnnnnnnnnnnnnnnnnnnnnnnnnnnnnnnnnnnnnnnnnnnnnnnnnnnnnnnnnnnnnnnnnnnnnnnnnnnnnnnnnnnnnnnnnnnnnnnnnnnnnnnnnnnnnnnnnnnnnnnnnnnnnnnnnnnnnnnnnnnnnnnnnnnnnnnnnnnnnnnnnnnnnnnnnnnnnnnnnnnnnnnnnnnnnnnnnnnnnnnnnnnnnnnnnnnnnnnnnnnnnnnnnnnnnnnnnnnnnnnnnnnnnnnnnnnnnnnnnnnnnnnnnnnnnnnnnnnnnnnnnnnnnnnnnnnnnnnnnnnnnnnnnnnnnnnnnnnnnnnnnnnnnnnnnnnnnnnnnnnnnnnnnnnnnnnnnnnnnnnnnnnnnnnnnnnnnnnnnnnnnnnnnnnnnnnnnnnnnnnnnnnnnnnnnnnnnnnnnnnnnnnnnnnnnnnnnnnnnnnnnnnnnnnnnnnnnnnnnnnnnnnnnnnnnnnnnnnnnnnnnnnnnnnnnnnnnnnnnnnnnnnnnnnnnnnnnnnnnnnnnnnnnnnnnnnnnnnnnnnnnnnnnnnnnnnnnnnnnnnnnnnnnnnnnnnnnnnnnnnnnnnnnnnnnnnnnnnnnnnnnnnnnnnnnnnnnnnnnnnnnnnnnnnnnnnnnnnnnnnnnnnnnnnnnnnnnnnnnnnnnnnnnnnnnnnnnnnnnnnnnnnnnnnnnnnnnnnnnnnnnnnnnnnnnnnnnnnnnnnnnnnnnnnnnnnnnnnnnnnnnnnnnnnnnnnnnnnnnnnnnnnnnnnnnnnnnnnnnnnnnnnnnnnnnnnnnnnnnnnnnnnnnnnnnnnnnnnnnnnnnnnnnnnnnnnnnnnnnnnnnnnnnnnnnnnnnnnnnnnnnnnnnnnnnnnnnnnnnnnnnnnnnnnnnnnnnnnnnnnnnnnnnnnnnnnnnnnnnnnnnnnnnnnnnnnnnnnnnnnnnnnnnnnnnnnnnnnnnnnnnnnnnnnnnnnnnnnnnnnnnnnnnnnnnnnnnnnnnnnnnnnnnnnnnnnnnnnnnnnnnnnnnnnnnnnnnnnnnnnnnnnnnnnnnnnnnnnnnnnnnnnnnnnnnnnnnnnnnnnnnnnnnnnnnnnnnnnnnnnnnnnnnnnnnnnnnnnnnnnnnnnnnnnnnnnnnnnnnnnnnnnnnnnnnnnnnnnnnnnnnnnnnnnnnnnnnnnnnnnnnnnnnnnnnnnnnnnnnnnnnnnnnnnnnnnnnnnnnnnnnnnnnnnnnnnnnnnnnnnnnnnnnnnnnnnnnnnnnnnnnnnnnnnnnnnnnnnnnnnnnnnnnnnnnnnnnnnnnnnnnnnnnnnnnnnnnnnnnnnnnnnnnnnnnnnnnnnnnnnnnnnnnnnnnnnnnnnnnnnnnnnnnnnnnnnnnnnnnnnnnnnnnnnnnnnnnnnnnnnnnnnnnnnnnnnnnnnnnnnnnnnnnnnnnnnnnnnnnnnnnnnnnnnnnnnnnnnnnnnnnnnnnnnnnnnnnnnnnnnnnnnnnnnnnnnnnnnnnnnnnnnnnnnnnnnnnnnnnnnnnnnnnnnnnnnnnnnnnnnnnnnnnnnnnnnnnnnnnnnnnnnnnnnnnnnnnnnnnnnnnnnnnnnnnnnnnnnnnnnnnnnnnnnnnnnnnnnnnnnnnnnnnnnnnnnnnnnnnnnnnnnnnnnnnnnnnnnnnnnnnnnnnnnnnnnnnnnnnnnnnnnnnnnnnnnnnnnnnnnnnnnnnnnnnnnnnnnnnnnnnnnnnnnnnnnnnnnnnnnnnnnnnnnnnnnnnnnnnnnnnnnnnnnnnnnnnnnnnnnnnnnnnnnnnnnnnnnnnnnnnnnnnnnnnnnnnnnnnnnnnnnnnnnnnnnnnnnnnnnnnnnnnnnnnnnnnnnnnnnnnnnnnnnnnnnnnnnnnnnnnnnnnnnnnnnnnnnnnnnnnnnnnnnnnnnnnnnnnnnnnnnnnnnnnnnnnnnnnnnnnnnnnnnnnnnnnnnnnnnnnnnnnnnnnnnnnnnnnnnnnnnnnnnnnnnnnnnnnnnnnnnnnnnnnnnnnnnnnnnnnnnnnnnnnnnnnnnnnnnnnnnnnnnnnnnnnnnnnnnnnnnnnnnnnnnnnnnnnnnnnnnnnnnnnnnnnnnnnnnnnnnnnnnnnnnnnnnnnnnnnnnnnnnnnnnnnnnnnnnnnnnnnnnnnnnnnnnnnnnnnnnnnnnnnnnnnnnnnnnnnnnnnnnnnnnnnnnnnnnnnnnnnnnnnnnnnnnnnnnnnnnnnnnnnnnnnnnnnnnnnnnnnnnnnnnnnnnnnnnnnnnnnnnnnnnnnnnnnnnnnnnnnnnnnnnnnnnnnnnnnnnnnnnnnnnnnnnnnnnnnnnnnnnnnnnnnnnnnnnnnnnnnnnnnnnnnnnnnnnnnnnnnnnnnnnnnnnnnnnnnnnnnnnnnnnnnnnnnnnnnnnnnnnnnnnnnnnnnnnnnnnnnnnnnnnnnnnnnnnnnnnnnnnnnnnnnnnnnnnnnnnnnnnnnnnnnnnnnnnnnnnnnnnnnnnnnnnnnnnnnnnnnnnnnnnnnnnnnnnnnnnnnnnnnnnnnnnnnnnnnnnnnnnnnnnnnnnnnnnnnnnnnnnnnnnnnnnnnnnnnnnnnnnnnnnnnnnnnnnnnnnnnnnnnnnnnnnnnnnnnnnnnnnnnnnnnnnnnnnnnnnnnnnnnnnnnnnnnnnnnnnnnnnnnnnnnnnnnnnnnnnnnnnnnnnnnnnnnnnnnnnnnnnnnnnnnnnnnnnnnnnnnnnnnnnnnnnnnnnnnnnnnnnnnnnnnnnnnnnnnnnnnnnnnnnnnnnnnnnnnnnnnnnnnnnnnnnnnnnnnnnnnnnnnnnnnnnnnnnnnnnnnnnnnnnnnnnnnnnnnnnnnnnnnnnnnnnnnnnnnnnnnnnnnnnnnnnnnnnnnnnnnnnnnnnnnnnnnnnnnnnnnnnnnnnnnnnnnnnnnnnnnnnnnnnnnnnnnnnnnnnnnnnnnnnnnnnnnnnnnnnnnnnnnnnnnnnnnnnnnnnnnnnnnnnnnnnnnnnnnnnnnnnnnnnnnnnnnnnnnnnnnnnnnnnnnnnnnnnnnnnnnnnnnnnnnnnnnnnnnnnnnnnnnnnnnnnnnnnnnnnnnnnnnnnnnnnnnnnnnnnnnnnnnnnnnnnnnnnnnnnnnnnnnnnnnnnnnnnnnnnnnnnnnnnnnnnnnnnnnnnnnnnnnnnnnnnnnnnnnnnnnnnnnnnnnnnnnnnnnnnnnnnnnnnnnnnnnnnnnnnnnnnnnnnnnnnnnnnnnnnnnnnnnnnnnnnnnnnnnnnnnnnnnnnnnnnnnnnnnnnnnnnnnnnnnnnnnnnnnnnnnnnnnnnnnnnnnnnnnnnnnnnnnnnnnnnnnnnnnnnnnnnnnnnnnnnnnnnnnnnnnnnnnnnnnnnnnnnnnnnnnnnnnnnnnnnnnnnnnnnnnnnnnnnnnnnnnnnnnnnnnnnnnnnnnnnnnnnnnnnnnnnnnnnnnnnnnnnnnnnnnnnnnnnnnnnnnnnnnnnnnnnnnnnnnnnnnnnnnnnnnnnnnnnnnnnnnnnnnnnnnnnnnnnnnnnnnnnnnnnnnnnnnnnnnnnnnnnnnnnnnnnnnnnnnnnnnnnnnnnnnnnnnnnnnnnnnnnnnnnnnnnnnnnnnnnnnnnnnnnnnnnnnnnnnnnnnnnnnnnnnnnnnnnnnnnnnnnnnnnnnnnnnnnnnnnnnnnnnnnnnnnnnnnnnnnnnnnnnnnnnnnnnnnnnnnnnnnnnnnnnnnnnnnnnnnnnnnnnnnnnnnnnnnnnnnnnnnnnnnnnnnnnnnnnnnnnnnnnnnnnnnnnnnnnnnnnnnnnnnnnnnnnnnnnnnnnnnnnnnnnnnnnnnnnnnnnnnnnnnnnnnnnnnnnnnnnnnnnnnnnnnnnnnnnnnnnnnnnnnnnnnnnnnnnnnnnnnnnnnnnnnnnnnnnnnnnnnnnnnnnnnnnnnnnnnnnnnnnnnnnnnnnnnnnttgggcgccacttgacccgtccagcaggccaggttattcgcgggtctcgagggggttgtcacctaaaggggtcatgagggcgagagaggaggagaccaagcggcgcaagaaaggacaagagtccgtctgtgcaatgtcaaggtctcgtttattgaaaggtaaagcttgcttatatgcaggggatttttactcagggcggggtaagggagcaggaggaatggaaaattttcaagaggaaatagaggcgaggtaaatcttagcccatggtcccattgttagcgaaccgcagctatttctgagaaaagggagaacattttgcaacatgtattgtgcagcttaaccggaaaaaacatcttgtagtcgaagcgattctggtcatctaacaatgattaactcttgattcagtatgaggccccttttggccttcgacagtctctggaaattgttatttgtcaggagccagccctggtcagatataaaagtctcctttacaagaggcctgacgacctccatgctcagctaaccaccaattagtcaagtacctcccctcttaggttctgggacacctgccctggcctgagagcaattaacacccattcctcccccacttcctctttctttacttcctcctttctctttaaaaaccccttgtttataatcaataaaattagaccttgacaaggacactgcttggtctcgattctctttcttgcccatttattttcaggctttgtccccctcggacccatgaattaccagaaccccgcaggcccgggcagttattattactagtttccaaggaatgttgtagggagccgtccctgtattctccattacaagatggcgcctgcatccggcaggcaccgaatgtaaacaagttattgcgcaggcgctgggtaactttctattccttggtctctgcctattccgtggcgtcatatggcccgatgagctgcagccaatcatggggtgacacgtccgaggcggcggttgccagcctttattaggggacgggattcttggctcggggtctccgctctggtaagcttatgctctcctctcaagacgcattaaagctttactgcagaaggatccgaatgtcctgtgtggttcttgccggcacgactatcgcgcgggacagaatgttattatcctcaacaactgtctggtttctaaaaattgttatgggttaccctgctccagagagtcattactacccatgttttgagaataagtataagccactctgttcccggaaaaaaaacactagctgtcccatggtcttgcaaatgtaaaatccaaaataacattccaaacccctcgtaggcaaaattgtaagttcaattcccaaccaatcagtaaatgactcttgtatgttatagccaataaatatgttgttgtactcctgcctagtgaccaaaaagatataaaaactgcttgctttggaaactcggggtcaatctcagagaaagacgccaatgcattggaataaaatccttttgcttttgcatcgaacttgcatcctgtgagtgactttgtggggtgtgtctcccaaagttgaaccccactttgggcccaacaggacttagaacagttgaatttaagttgcatatagagttagcttacatttttgaacagtagctacatgtatgcatacacatagatgtatttaacaggactgggtaaaagtaagaagaaccagagtatgatctctgattctcatgttgcagcaaacaggcagaacacttaaaggtacagagtagacttaaaacttccagtgacaagaaagaagatccgccacagatggaacaggcaaggtttttgtgtgaaatgtgtccctaccaagccctggaaaggcacgccattccacaaacaagccatgcgcaacagagccagtgaaagaagaaattagagacaaaaataaaaggcaaatgaattatgtctgtcagcagggtttgttggcagaagctggctagactgtccctctgcctaggctgagggaaaggagtaacccatggagtgggcaggcctacagctaggccacgtaatcaagatggctgcttctataaacatgttcccatctgacaaaagtttaactctcagagtgtcctgagcaaatgctgcctcaggccaggccactgtgagccgctggcatctgtatagaaaagaaacacactaggtcagccgagataggacaaacaggagagtgagagacattttgaacaggagcataagaggtctatgaaacaggacatttccaggtggaaggaggttcctgcccttagcagtcttagccatgatgggaagtggcaggatgccattgtggcaggcaagagagttttagtgaagggaccagccccctgtttttgcagctatgacaggttaacatgtgctcccctgtccttgctgggcctgtcctgctcagtaggaggtcagatgcctgcctcgtggcaaggaaccaatcagaagttagctagcagggctatgctttatggctctgggtgtgctttacagacaagtgcacagcagtgacgcgaagagcatagcaactgccctgggaaggcctatgggccataacaaccagttgaccaatcaacacagggcaggtcgtccaaacctggaagcacaccaatcctgagactgtgcatactcctaataaccccttacgctgccctataagatctctgtctcatggtttctccgggtctttccccagctgtggtggatggatgaaaggcccaagctcattaaacaacttcaataaaagactcgttgtttttgcatagatatgggcctcttggtgatttgggggttcagaatttggacacaacattagcatgctaagaagaggagggaaacagacaagtgaaaaagagcagaggacagactcccaactgtggatcactggtagaatgaagggtgccaataagcaggcacatgatttgatatagggggcccagcttccttgagagaggtagagagatccaaagcctataatctccagcatcccagagactaagggaggatcagatgcaaaaggcactgactgattttgaggtccattgagcacaaatcaggggtcagggctcccagagcccaacagatacatgatcatccagttctgggatttttggccggtccaaaaaggcaagagaccacagtctccatacaagtacaagtcctaattcctggttgcatgggcagaggtagaaaggaaggggcagccataccagattggtgaaacccacaaaaacagctgacctgaacaagggagagctcttggtccccagactgatagctgggaaaccagtatgggactgatccagaccccctgaatgtgggtgtcagtgaggagaccttggaaatctatgggggcctcaggtagtggatcagtacttatcccttgcataggaatggactttgggagcccatcccacaaggagggacactccctgagcctagacacaagggggttggcctaggccctatcccaaagaatatgatagactttgaagacctcctatgaaaggcatcacccaccgccatgggataggtaggttgttagttgggggccaggggaggagggagggagggagagggacctgggattgacatgtaaaataattttctttctaataaaaagaaaataaaaaaagaaaggaaggggcaaacctaccagacatggcagtggtggatagaagaatccagagatccttagttggaaaagtgaccaagttgaaggttacagggttcccagaatatctcagactgccacaagcaggaacagatgccaggaaaacctgccgagtcacgtgcaccaaaatgttgttcttttgtttaatttacatggtgcaatcacaatggaacatgaaccaagagattcattaaccatggagtttattaaatgggggtgagcaagagagggggatggagagagagacagatgaagagagagagggtgtgaaggggaagagaggagggagtaaaaggaacaagaaagcaaaaagagcagaaagagagcaagagcacgtaagtgggcaggggtctatcttttaaagaggtcctttgcacctgcttgcagactagtactagtactcatgaaaccctgggctgaccagagtactgcctgagtgtattctgccaggtgacaggggcagggcagcataatgcccaaatcttcactactgaagaaagggaaccaattctcatgaaagcaactgaagcaatcctagaatagcttcaatgctgatgaccagagggcagagataattgatcatgctctaccaagaaggagactccaatgggactatgacacagagtgaggtaggaagtcattcagtgaatagcaccaggttctgctagaaggggtgaagcaggcagccccaaagcccactaacctacttaagataacagagatgaaacaggacccagatgagtcaacttcagctttcctggagcaacccctggacacatattggtagctaagaaattaataacagaaattattcctaaatttggcctccccaaatctttgggatctgacaatggcctagctttcacacccaagttatcccaagtgatctctaaggctcataacataaatttgaaacttccttgtaagtatcattgtcagaagtcaacaaaagtagagaggatgaatagaactctaaaggggactacaactaaaaatactcaattgactttggatatgactatccctcaggtccagactgatttacctgttgggtacccttacctgatcaccatcccagcctggagaagttgtattaaaccaccacttcaaaactgaccaggttgaacctatatgaaaaggcccttacaccgtgattctccagaccctgactgctgttaaggaaatggtatttctgcctgcattaatcactcacacttcaagaagacacctgaggaacccacggaagaggatcccaattcccagagatggaaagtgaataaaaaaggaccattaaaaattaaacttttaaggtttcactgtctaacataactttgtgttcttgctgttgaaatttgcaccaagatgattgtcctataactacaattttgttgttttgtttcagcctatgcaaacagaacataaatgcatcttgacaggggaaacaaaaggatcccctaacataggaaacaccagatactgtcttgccatgcaaaaaattgactttgtctaccagggcccatagtttggacaaaaggagagtaaatattctttagccaaatggatggaggatactgggatggaataatctaactgaccaagtccaatgtaaaaacacaggcttcaacatagtcaaatattctttaaaggattctgataatggaaattacaggtgtgctaaaataaaaagaggaagggaggattcattaattacttcaattgaatttaacacacaaaatttcacttattcataaacaaatcaatatgagttgcttacaataaagacttaatgggttgtagagattactcagttgctggtagccatgtcagaggagcaacaggtaaaaattgaagttcgaggtgtcagcctaccaggaggcaaatccctgttgggtgattctcagataggcaaaccctctcctgccccacacccagccccccagaccacagactccagaatgtcttttgcttccactgttcctttatatgtttgctgctgccatctttctctggtatctggtatggtgggggggcggggtagatacccactgcctataatgtagtgtgtttatctcatggaacatcccattctactgggcatttttacctgtggattataatgaagaggatttcttcctaagcagtactgtctaattgataaaaataatgttagtttaaatagagtttgatgactaaaaataaatacaagaaattgtcatacaactagggcctatgagtgtcaccaaaggagatgcatagagggctattcaggttcatgattaaggaaagcaactgagtccccagggtggctcaaattcttttcaccttaatgttgggagatgtgctcacaggtttcagagtgtatcatagctgaaacaaagcttttaaaataaactaaggttggaatgagactttttcttttgttcaatagccttgaggtgaaaaacccaagaagacaatctaaagttttagaaaggtacatcattaagtgaggaaatctttaaggtcaggaaacaagaacaaagctacccaattatcattagctggggtgcctttcttcctaggattggttgatgaccaaagataatgattaatttcttataccttatacccatttttgccctcaatctcctgttatatatatttataatacctgttgatgagtgggtatacaccctaaagattttaaagtagtgctgactgtttttcctgtataaaagtctaggtttatgattcctttaagattccttataaaattacctttcaagataagcaataaagtgattggttctttctttgtaaccatgaagcctgccaataaaagaatgccttgcttgcctaaactgttaatctataacaagttgcttgggtatgaatgtgtgtgggttcttaggataacatgtcttgcacctgtaatacataaaatgtttaatcatgtacaggttttggaaaacacactgttttttacttgcattcattgtgattacattatttaaaaaatagaatgtaaccacattgtaatttttatattgcctgaaagatttttgctggggtatataagctatcagagaaaaatagaagggaggagaagcaaaaatatcaagaatgagagaattagaaagaaaaacatcaagaaagacagaagggacatttatggatagagataagaatagagaatataaaagaagaataaacaaaaggcctaaagaagaccatcaagagagtgtgtgtcttttccttaaccccctcagataaaaaagtcttagtattcatggattccctttgggccctgctgctggatgctggtcccccaggcagcagaactcagtgatttagagcactggctgctcttgcagaggctcattcccaaattgtttccagcacccacatgacagctcacaacagttccagggtattcaatgcttctcacttccaagggctcacacacatatatacacttgggcacattgctttttttttattttttaatgcttaaggaaagctcaacaccaacataacattctgagtgacactgaaaagcacttagctaccagctcccaaacccaaatctgtttcaggctgagtataagcacataaaccattaaaggcagatgaaaatgttgcagggctttgaagtttttctgcccttgacaagaagaattcaaactaatttaacatgacacaagaaagataaagcaagcaaggtttagtaactaacagtacatgtgcaaaggatctaacaacaaaatctgtggttcggttcagtttgttttttgagagagggtctcactatatagatcaggctggcctggaattcacagagatcctcttgcctccacttcccaagtaatgggatttaagatgtacactaccacaccaggctacacaggccttttaacccagcctgcccactcttttctacatgattctctgcatctcaatgggtaggtttaaaatatttcctaccctctgaggttggctcttgaactagaagttccttacttctttttgaaatagctcaagttcttgtggttgttctcatgactctctgttggttagacatctgttgcttcaaggtaaacttctgatactttaaaattgaagccagggttttgtgatagctatcagccagtaaaaatggaatagggcttagactgtgttgtaggctcttctctcagcttgttttcatatctcacttctatgtagtaagaaaggcaggagtgaccaggtatattggtacaggcctaaaatcctgacacttgggaagtacaagcaggaatatttggagttcaaggtcatcgtcagctccagagtaagttccaaggcagcctaggctacttcagaccctgttggggaaaaaacaaacaaacaaacaaacaaacaaacaaccacagtggactggcaagatggcccagaaagtaaaaaacacttagctccaagcctgacaatttgagttcaatctctgggaccatatgatagaagcagaaaaccagttcccacaggctgtcctctggcctccactcacatgattgcatgggtatatcctcttttctacccacccaataaataaatagataaacaggttattaattaattaaaaacaaaagaaaaacattgttgtttttttaaaaaaattctaaactgggtggtggtggtgcacacctttaaccccagcactcaggaggcagaggcaggtggatctccgtgagttcaagaccagagctagttccaagacaacctccaaagccaaagagaaaccctgtctcaaaaagaccacacacacacacacacacacacacacacacacacacacacaagctagagtcagtgagatggcttagtgcgaaaaggtcctgatagtcaaccctgaagagctgagttccatacttgagaaccacatagtaatagagaaccaatgcctgtacattgtcctctgacctctatgtgcacctttgtacacaccaaaataaaaccaatcaacaaaagcaaaatggtgacatatgttgcaggttaccttactcggacaccccttgggagagagggtgagaagacaaagcaccaacaactcaggcactgggtgtcagtgagtggcagagcaggttgcagactcatttatttagaaagttatgcctgcctttgtacccactactagggtcctatttattgggtaaggcagctgactgctgtgttatccttttctcattggtgtctctgggtcaggtgtctctctgccagcgtctctgggcattgaggcaggcttggcttggctcttagaggaagtgtcctctctacatgtgcatgtgcatgcagactggcctgggcaccccgggacaggcgactccggcttggctaagctggctgaagtttctcctacaaacatatcccagtgttcctcaacctgtgggtcatgacccctcagcaagcctctgtctccaaaagtatttacagtgtgattcataacagtagcaaaattatacttatgaaatagcaatgaaaataactttttgactggaggtcaccacaacaccaggaactatattaaaaggtctcagcattaggaaagttgagaaccactgctgtaaccccgtttctggggttgcagaagtaagccaatttctgtgagtttgaggtcagcctggtctcctctaggctacatagagactctgtctcaaacggcaaaccaaaaacacacaaaaaacacaaaactatgatataaaattctgttgattaggatcttagtctgggttactgttagcatccaggcattatgctggcctcccttgaggacctaggagaatatgtcaccaaccacaaccactccctatgcacatgcacttgctagcatcatgctagcctgcccccagttgtcttcagctgtagccaggaagagcatcccctgcacacatgtgttctcagcattcaggcagatacctgcccagcccaggatcctacagctgccatgtcactacgtagtctgcatgcatgtgctatgtcattgcgtagtctctgtgtgcatgtgctaagcccctttaaaagcaaactctgcccatttccccttccctttcctgctgctcttctgaagaggtaggcaggcctttgctcctctcccttcccaccccaataaacctccaatgtgagagttccttgtacagtgtgattcatcctcaccactgctactacagtaactatttttgtgatgaaacaccatgaccaaagcacactggggaggaaagggtttatttggcttacacttccacatcatagtccctcattgaagaaagtcagggcaggaactcaaacagcacaggaaccaggaggcaggagctgatacagagaccatggagggatgctgcttactggtttgcttcttttgacttatgtcaggagacagccctgattagatataaaagtctcctttacaagaggcctggcaacctccatgcttggattaccgccaacgtagtcaaacacccccaccccctccccgaaggttagtgttctgagataaaccacaagaatgttctgggacacctgcctaggcctgaggacattaaacacccattcctccccctcccttacttcctctttctttacttcctctttctttgtctttaagaactctttgcttaagttcaataaacagactttgacagcccaatgcttggtctcgctctttctttctcgcccatttattttcaggcttagtccccctcgagagccgcaaattaccagaaccccgctggatggggcaggtggcgcccaacgtgaggcccaaggtacggactcttctccaaacggagaccctccccaaggaaaccttcggcagtgcacgccaacaaggaagtcctgctcgccgattgcgatggacgttggtctgggaacgttatcaccactcatgagcaactgattccctggtaagtccccctcattctattccataataatgggccaaaagttgtctaaggaggtcaaattcattagggattttaagacttcctttnnnnnnnnnnnnnnnnnnnnnnnnnnnnnntttttttgtcaagaacatgtccatgggtcattttagaaagcccagacattcatcccctaacttggaaaaaggtcggagaggatcttaatagattactcaaagaaaagggacctgaggcagttcccttacagacttttagttattggaatcttattaatgatatccttaccaattcccctggctctgcccaccttacttctgcaattaaaaactttcttgagcccctctcctgtgctcattctcccacttctgactgccccatagacaaacctccatcctctccctgtccttcagtttccatctgtatgccccctgatgagacccagaccccccacatcttacagacaaacctcccttaaaagcccccgtaatctctatccctctttacagggcctcgagcctcattcccctaaaaaccttaaaagttaccctgtctttcgttcaaaccccaaaccataaactgatcacctaagtccatcagacgaggaggacctagaagaagcggcggctgcttttcacaaccccaactggcctcccttcgagggctttacggcccctacagggcttccgacttatccttccgccccccttctcccatcttccacaaacgccttaattcaagctaaaaaacatctcacccaacaaatatcagaacttaaagaggtcttacaattacaacaggagttttcacagctgtctctatacctcacatccctccagaccactgttggccaatcgatcttcggactccccactcagcccattacagcccctaaaccctcccttccaccaggcaacaggccaaaaatctccaaatccactaagctggcctttcctgacttaacccctcaaggctccaagcatacaccatcctcctctaaccaagacccctcctctactcatacaattaggcaggaggatgaggaggaaaactcagagatgaaattaataagagggataaaaatgactctgagtcagataatgaggtccaagataaacagacagaaacaaccgaaaacatctttaaaaaattaaaatttaaagcccttaaggaacttaaatcaacggtcgaaaattacggtcccattgcatctttcacccttggcttactggaggccctctcaggagagggatgcctcaccccagctgaatggcaccatgtcacacaggcagtccttagctgcgggaaatacttaacttggaaatctgaattctatgaccgttgacaaaaccttgctaccaagaatcaacaaaggccctccactcaaaaatggacccttgataaactcactggtcaaggaaaatttgtctctgaaattctccagattaagcttcgcataggtctcttaggacaaacctctcagacttctactggtgcttggcaagctctctcaggccgagggtccatgcttacaccccttactaagatcattcagggagccaatgaaccttatacagaatttgtagggagacttacagaggccacagaatgggttttgggcacacaagaaactgacaataaactccttaaacaactagcttttgagaacgccaagagtgtttgccgaaatgtcctcagaggcacctttagaaacaagtcccttgaggaaattattcgggcctgcaatgatgttgactctttttctcaaaaactctcacagagcatttcccagggggtcactatggctattggtgcagctctacaaacaacaggtaacaacagagcttgctttaaatgccaccaacctggacattttgctaaacaatgtccccaaaatattacacccagaccttcagagggcatcctgacatctcgatcccaaaatggcatattgacctttgccccttcacccttgcagaaaactctctgtcccaggtgcaaaaagggtaaacattggctcagggactgtagatccaaaactgatgttcaagggaatcccctgcctcctcctcagggaaacnnnnnnnnnncagccaatccccttcttgccagcatccgggccaagcctgcaggcacaatccttccaacctgcgcctccaagctctacagagccacccccggaagcacaggactggacctgtgtgccaacaccgactcaatattaaaccctaaggatggtgtacagattctctccactggaatttctgccccaccgcccccagatacttgttttctcattcttggtcgagcctcctctaccaccagggccaggggatcgttgagagatctcaccaaacactaaaaacatgctatttaaactatattcaggaggaggaattctataccccactaaaggcaatcacaagaacctactcaatcatgcattgtttgtgctaaatttcctcacatatgatgccacaggaaaatcagcctcggatcgcctctggcatccatcaacggctcaaaactatgctcaggccttatggaaggatcccctaactcataaatggaatagaccagacccagtcttcatttggggaaaaggacattcatgtatttttgatactcaggccaataatgccagatggttgcctgaatgccctttaaaactatataatccacccagggaagcccctgagaagtcttctaattctgcttaattccagataaagaatgatgtctttctggctacttgtgtgtttctcactctcaattatcgttgccgctgcaatctcctatcagatctacaactacaccaggatgatcatcaaccaagctggtgatgttgccaatgcctctacatacattggacctcagccctcttattcccccctgatagtagctctttgtgccttggctatgggagcccaccctctctgaggaacttgcttttatgcaaaaccgggcctcgttgaagaaagcctaaaaaaggttcaggatagcctagagaaccgtaaaaaaacaaagagaacaagcagaatcatggtacaaaaattggttttccacctctccatggctctccactctgttaccttccatacttggtcctatggttgggtttctcttattaatttcctttgggccttggccttttcaaagattaaccagattcattaagtctcagattgacaacctcctcggaaaaccggtttcggttcattatcatcaactggaggtaggagaccctgagctgcctgaccataatgaaaaccccaacaatcctcctaaaggcctagatttttcaggccttgaacatcgaacctctggatttccttggccttggagacgtcaatgacgtcaatgacgggattatcgtgatgccgcaggccagacgccgacccatctcaccagctgtagtgctcctcaatgacaggattagcatgcggctgtgaccccaggggcccactccaagcactctcgagctgctggccttatgaaacgtcccctgagtgctgggggcagattcacctcacgtagcctaagacagaggctctacccctcactgtcatataaatgacaatatcataaacatagggtcctggctgctgatgcccatcatgtagcctaagacagatgctacattctattatacatagaagggggagatgtcaggagccagccctggtcggatataaaagtcccctttacaagaggctggcgaccatgctctgggacacctgcccaggcctgaggacgttaaacacccattcctccccatcccttacttcctctttccttacttcctctttctttttcttttagaactctttccttaagttcaataaacagaccttgacaacccattgcttggtcttgctctttctttctctcccatttattttcaggcttaatccccctcagttcccgcaaattaccagaacccccctggacagggcagacttattcagcctgctttgtcatagaacccagaccaccaagcccagggttggcaccacccacaatgggctaggccctcccaataaatcactaagaaaatgctctacaagcctgcctacagccaaatctttttttccccctgagagacagggtttctctgtattgctttggtgcctatcctggcactcgctctgtagaccaggctggcctcgaactcacagagatccaccggtttctgcctcccgaatgccggcattaaaagtgtgcaccaatgcccggcttatagccagattttatggaggcatgttatcaattgagagtccttgtgttaaactgacataaaaatagccagcacagttttttaaattggtttttatttaaattaaaaacagtcttgttttacataccaatcccatttccctctcccttccctcctcccattcctcccaccaaccctccccccatcctaccccctatccactctctagagcggatgaggcctcccttggcggatcatcaaagtctgccaaatctaagctctcccccaagtatctaggctgagagagtatccctccttagggaatgggctcccaaagcccattcgtgcactacagataaatactggttccactgccagaagacccatagactgtccaggacccccaactcacacccatgaacaggggtgcctgctttggtcctatgctggttccccagctgtcagactggggtcactgtgctctcactaggtcaggtcagctgtttctgtgggtttccccagcatggtcttgacacctttgctcatcactcctccctctttgcaactggattccaggagttcagctcagtgcttagctgtgaatctctgcttctgcttccataagctcctgggtgaagtctctatgatgacatttaaggtagtcatcaatctcattatataggaggggcatttaaggtaccttctccactatggcttagattcttttgtttttgtttgtttgttttttgtttttcgagacagggctttggaggctgccctttgtagaccaggctagtcttgaactcacagagttccacccgcctctgcctctcgagtgctgggatcaaaggcgtgccccaccaacacccagctattgcttagattcttagttggggtcatccttgtgaatccctggagatttccctagtgtcagattttctagttaaacccataatggttccctctattaaggtttctcttttcttgctctccttttctattcttcccccaacgtgaccttcctgatccttcatgttctcctccctgtccccttctactctcctctttctcctacctctctctccccagtcccccgctgcttccaatttgctcaggagaccttgtccctttccccttctccaaggggttcatgtatgtctctcttagggtcctccttgtttccagacttctctgggtttgtggattgtaggctggttatcctttgttctatgtcagtgccattcttgggctagtggtcctggagtgagagcaaattaagcagaaactaatacttaaaaatctatctcaatcatgggccagctaacctattattgataagtaaatttctcttttcaaagctgagtacctctctgcccatgaaatagcttgtgaagaactgttagaggagaaaaagctcctggtcacaaaaatagaatctctgacctgggtggagacctaaaagtccacttaggctggttcaatttctttggctaagtacctacccctaggaaggcagactcaccttaaccatgctaaagagataggagtagtatgtagttatttaaaaagaagccatatttctccttcctcgaatccccacttctcgtgtagaagctcatgtaggatcttaagtctggcagcttttctgaaattatgcacaaacgtgtaagttttcctttactttgttacatttgttttctaagcatgcttttattaacactttgggtccccccccaatattttggccttccttaccgaaaggttcagactttgacgctgattggctctacctttttaagagacagaccctcccccctgacaacagccgaggcacgcacaagaaaacgtgctacgtcatcacatgtcacccggcacacatgaggactctgggcatgcgtggaaccccagtgcacatgcgcagtcttccctttaaaagctccaactttcctgcttcactctctctctggttcctctatttatgctgctctctctctgctcactccttctctgctcttctcccacctacgagctctctctgcctctctatggcgaccggccatggcagtcagccattacccctgttcctcttctctcttagtctccctactctgccgggccatataataaactagttaacatgtctaatcttgcatctttctcttttcctttctttaaataaagacataacacttactctttctctaaaacccccctccctgtcatgtggctgcttatttatcacgcctgtcttccacaccagtttacacagcatggattttctcttctctccttcatcctcctctaggcagcttcccaaatactgggattaaaggtgtgcaccaccatcacccgtcgagtaattttatatgggattctacatcaaggagataaaaattctagtcaaacctgaagtggcctcatcaagaatacaagatagaggaatgtctgccctcttaccctgtcacagtaccaaaatgaaaaaagaccaaggaccaagtcttgaaaaattcctgtgttaaatggcaaaggagaaagcttgaagacactagaacaaccagggagcaaggagaatgacaccataaaggcaaagagaaaattgttcacacgagcaaaggtttttcacttctgccaaaggcatgtaagtaaactggaaaacattctttgtatttgagaatgaggggttaattggagacctgagcctagaaatacgaaagaccatgaataattaatataattctgaaaacaaagttgaaggagtttcacatcatgatttcaacacttactacatccagaagtgtggtactaggtgttaagtgccagctgatcccatgtcctggggtgccataaagccctcagttctgtttttaagaaaagcataattctgccaaatggacaagataaccccaggcaacaactactcaaaaaaaaaaaaaaaaaaaaaaaaaaaaaaaaaaaaaaaaaaannnnnnnnnnnntatatttgctgtataaatctccaatctgaccaagtgaccagactagcagtttcctgtctctgtttaaatgtcggagcctgctccaacaagacagctgggttacctgagtaggggcatgaggattgagaaatggcagataaagaaagagtcagaaacacaggatagattcgggaggactgcctggtccatgcctttcagcacactggacagccctgagtttatttttgaacctgcttatatatagactaaaggcaaagcagaacaaagagcagaagcataatcagttaaccagctccctgcactgccattgaatcgaggagcagcctggctcactatctatcatcattcgggtcctagtaagcagctgtgttatctagctgtgtgcctacagcttgttagttagataatatgctctttttcatgggcttagtcagaactttctctcggctctcagggagactggagcaagcaagcttgaactctaatgttataagttagaatagactccagatagaaactgagtcacttgtgggctcccacacttaaaatgttcaagatgtaacctggggctggaaactagaagagatttgaggatggcagcatatgtaaaatacataagcctatggtgtatataggttagtaaagtcttcttttagagatcaactcttctttgagcattagcctatgtggtaatatattatttatgatttattaaagtcagccacaagctatagaagccaggcaatagtagtatatgcctttaatctcaccactagggaggtagaggtagacaatctctgttagctcaaggccacactaagctacaagaaatatatccagtcctaaagagaaacagctcacacaaagatgatctcagcacttgggaccacacgcctttaatcctaggaccaatgagatgtaaagggccataggcccaattatgtgacttaaagcccaaccctgtgagcctcctgtaacctgtaattagatacggtttggctaagcgggactactaacgactgctgttccgagaaaaggccgtggggccttcctgcttgctgtttcgaagataccacaagatgttccagctgataccacaagaatgttctagcccaagcaaataccagacattccttcctgctattctccccgcttgcctcacttcctcattgcagggctatttaagcccgtccccttgcttcagtaaatgagaccttgacattgtacagacggactcttgtcttttcttgcgctgcttggtctcctttctttctctcgcccatgactctttcaggcagccccttcggaccctgaagaactgaaccctcaggacaggtcgatgagagatatttaagacagaaacagggaggatctcagagatggcattcattctccagccacattgaggagaggaagacattcagtctcaggaatctctagccacactggggagaacatagcagtctgagtgaatctgaggagcagtgaagtcgggagcaatttgaggattgtccctttggtctgagctgaggtagaggtagtagctggctgctttgcttttctgatctctttttttttttttttttttgctttttgagacagggtttttctctgtagctttggagcctgtcctagaactcactctgtgagttcgaggctggcctcgaaatcacagagatctgtctgtctctgccttccaagtcctgggattaaaggcgtgtgccaccaatgcccagctgcttttctgatcttctccttgaagctggaacccctatatctgtctctgggtcttttatttttcatgctacaagcctaggctagacaagcactgttaaagagtttttgtttttgctttttgttttttttttttgttaatctctaagtgtgtgaagtgatttttcattgggaaggcatattatttctgtaacactaagagattatctcgtgatagacagacagacacacagactggcagacataccacacacacacacacacacacacaaactataggacctatgtaaaaataaccttcaaatttcttcaaattgtttccatacttatttagtagtatgctaataaaatataaagagaggaattttaacaccattaaattatacatggtacacactactatgatttttgctttattcagcaagtcatagaaatcccttcaagacattatagtaactctcaaaatattgaaaaaataataaataatacatgttaaaacacagttgagactttgattaggatcatggtagtatatgttgaaactactgcagtaaggtcttacagtggagccattgggattaaatgcaaaaacatcacgtacaagtagaaatttagaagtaagaagttgggtcagggacagaagaaaaagtgccaaacaggaaattgtcagggatgaaggaaattctggctaaaccaactcaacaggccaagataaccatgtatcacctgcagctaaaattctaaccctatgaagagggttagacctcatgaccatggcaactcttatgaagtaaaacatttaattgggccagcttacagtttcagaggttcagtcctttgtcattatggcaagaggcattgtggcttacaggtagacatagtgctggagaaggagcttgggacttcaacattcagctccataggcagcagagagagagacactgggcctggcttaaacatttgaaactccagagcccatgcttccttcaaggccacaactactccaactgaaagacccccagaagctcaggcccccaggttctcagtccaggaactcaaccatcccaatcaccaggcagagtcggaagcttgatgcaaactgcacgaggctttattatagttgtttaacaggctaaccccatgttagctcgggtctttcatccacccaccatggcagatggctggggaaagacagcttgaagcatctgcatagagatattatagggcagcataaggggagtgtctaggggtaagcacaggctcagcattggtgtggctccaggcttggagggtttgccctgtgttgattggtcaactggttgttatggcccataagccctcccagggtggttgctatgctctgtacgtcattgctgtgcacttgtctgtaaagcacacccagagccgtaaagcaagcaccaccagctaacttctgattggttccttgccacgagacaggcgcctaacctcctagtgaccaaggcaaggtcagataagcacgttttcggctgttatggctgccgaaagggacaggcatctgaccttagtgaccaagacaaggtgaataaacaggaagccaaaaaggtagtgaatcctttgagaaaaggccgaagaacttcagctctgggaaggacattcagcccaaaagagatctcacacatttcatcaaatggcctgctacatttggatgcagtgtcaaaggtctatcctctctataagcagctcaaagtacctcctgtgttgtaacctgtcttttgcgggcttcagtcagatccagcagacttgcctggatctcttgtacttgagagggagagtgtggattgagaaattgaaaggaccagctccccatttcggcagccataacagcctaacacttgcttgcctgaccttgccttggtcactaggaggtcagatgcctgcctatttcagcagccataacagtctaacatgtgtttgcctgaccttgccttggtcactaggaggtcacatgcccgtctcgtggcaaggaaccaatcagaagttagctagtggttgacccgtccagcaggccaggttattcgcgggtctcgagggggttgtcacctaaaggggtcatgagggcgagagaggagagagaccttgcggcgcaagaaaggacaagagtccgtctgtgcaatgtcaaggtctcgtttattgaaaggtaaagcttgcttatatgcaggggatttttactcagggcggggtaagggagcaggaggaatggaaaattttcaagaggaaatagaggcaaggtaaatcttagcccatggtcccannnnnnnnnnnnnnnnnnnnnnnnnnnnnnnnnnnnnnnnnnnnnnnnnnnnnnnnnnnnnnnnnnnnnnnnnnaaaaaacatcttgtagtcgcagcgattctggtcatctaacaatgattaactcttgactcagtatgaggccccttttggccctcgacaagtggtgctatgctttacggctctgggtgtgcttcatagacaagtgcacagcaaaaaaagatgcgcagagcatagcaagcaccctgggagggcctatgggccataacaaccagttgaccaatcaacacagggcaagtcctctaagcctggaggcacaccaatcctgagcctgtgcttacccctatacactccccttatgctgccctataatatctctatcctgtggtttctaggcatctttccccagccatctgccatggtgtgtggatgaaaaacccgagctaacatggggttagctcgttaaacaactgcaataaagcctcgtgctgtttgcaccaatcttgctcctctgcctggtgataggggtctctgaggtcctgggctgaaatcctgggggcctgagcctccgaggggtctttcaaaacatcaggtaaagacgctaagaaaaagagacacaggatagagtcaggagggcattccagtgaatattgaattgaatacaccaagtttatacttcatcattcttaagcaccccaaacaaagaggggaacatggtatcgtgtacacaggaataaacaaactttcttccttaattctctaagcatttggtaaccacaccttagactctatttcttgttatctggccttgagggtcaagagaaaccacacctcagaccaagtctgttgttatttagataagacatccaaggcggagagcaaacatcctatagtagccacgccttatacctttaggtcttatgacttactaaggacagttttgaactctctgactttgagccaagatgaagtggagccgtctttatgggtcctgaaaactcctgccaaaaaccagttcatccaggccctggactggaaaactgcaacccagttgcttatgcttgcccacaagtataggccagagacaaagtaggatgatggtggtaagtccttctgtgtatatgtttctcttattggttaacgaataaagcaccatttggctgattggccagacaggaagtgacatagctgggcaagaaaataaaacaaatagatcaactctatataacctagttaagcactttctaaatccccctacacaaaaaaagaagttttcaggatcagaccaagaattcatagtataacctctctgattttcatccatcaggttgtctccttctctgacacagagatagtgagtcttacatgacaagtgacttttctattactctttccagacagtcttgaggaattgaatgcttccacttgctagaagcatgaacaaaaaggatgaagtctcaaagggtcaattccaatttcatcaaaccaaagtatattctcttggagatgacattatcaggcaatggaacctcctcatgacttcaccttgtcaactactaaaacaaaattaagggattccttgaactcataagcatcacagccacaggaagctgacattttctttactgggttctccttcatatgaatttaattagtttacaaatatggacccttgtcctgaacagactcactactcttaggactccaaattatgacaaagttttatatttgtaattttaaaactcaggacaaacaatagagattttaacacagtggacaccagagagccatggtttattgtatcttcttgacaatggactccaaatgtataagaacaagtccggaaaagttcttcagctcagtgaaaatatgtggtatgagacagtggtaacctaggtcattctgaccagaatgctgtttctgccaatccttggcatccataacaataataaataatctttataaaagccctttcccacccatgtcagtttgttcctagaacatgtaatacaagtgagccatgacaaatcagcaatctccccctcacacgaatatttttgtttatgggtgggtgtggtgcatggcacaggacacctgtagagatcagagagcaacttgcagaaatcagttctctctttccactgtgtggattctaggaattgaattcaaatggttagatttgacagcaagcacaagctctttatgaaaacagcctcacaggcaccattttggagcacttattctaaacaactagaagatggtgcccaagtggccatccttatcactgtgactacaataaaccttttgtttgcagctggtgtgcttcaacttgccttttaagttgacattatcatttgaacccttacaaaatgcctcacccttttgtttgggtgcaatggcaacagccacaagaagccaaggtctctgccctatcaccattcaacctcatgttgataatgccactaaaatgaaaataccactagactgactttcaaaaaaacaggagggggggggatcccctccttttcacaaattgtatgcattgcagaaatatgctagaccccaccactcacactccttgacacaaaaggtccagttgagatctaggacctctttcctattgagaggtcccctaactcctgcctagaacaaaaagacagttctgaggtagtgctggcaaactgtcctgtgctatttaagctcactgagaagctgggtgtggagatgggatctggccaatttacttcagactcaagcatgtttgtctcaaaatgtcctccaaatccctgtcttgggtcaagctggcctcttgactctgtaacaggaaaaagaaaaacaaaacagctcagtaggtaaagacatggtaccataaggacagctatgggcaaactattttcaccagaggttactactatttatagagagatgtctatagtaaaaacaactactgtaaaaggatacaaaaagtaaagctagtccctgactctgtgacagggagaaagcacacagtgactgttataatgctgccggaactggactggtaacattccttggggagatttggggagttattcactacctggagacaaacagggttttgagttcagtttgtttgtttgttttttggttttttttgtttgtttgtttggttggttggttggttcttggtttttcgagacatggtttctctgtggttttggaggctgtcctggaactatctctagtagaccaggctggtctcgaaatcatagagattcatttgcctgcatgcatgctgctgctgctgctgccaccaccacctggattgttttactttttaaaaaagcacctttatctcttcctctttcccttgtgtcttctgcaagtgaaagaactcaacctgtgaaactagttagctatctactgacactgcttccttgagctgagatcacaaaattccttcctctgtttattttgctgttttaggcctacctgtgtacagcataggtaaactctcctcctatgtccataccaacctaactaacgtgtctttttaaagggtataactacatttactggtaaaagactaaaaattaatagaagaagcaaaatgaggccggaatgtagttcagcaactccactcttagagggccaaaaatagtcaaattccaaatgtttcagatgaccacagacctcccaggcagttcatggagaaaccccaacaaagggtcagcaactgccatttacttaggcaagattgattagcacatcccgaggtctgagggttttacaaccggtgtgtcaggaggccatctgattcccagccctcccctcaagacaaaaggcctcctaggaacccatgactctcgtactcaacagtcagagggttgcagcccctccctaagcttgtgggttttgcctttaaaaacacctgtgcctggagatcagggcttctctctagcctgcctgctgaggaggcccgtttgtacaaacgttcacctttcttaaagcctcttgcatgttgtatcaactggactggatattgagttcttgggcgactgtccaggttggagattcctcaatctgaggatcttttgaaggactttagaattaacaaagaaataactaagaagaaaaacaatcctctcaccctaagaacagggagacctgacttaaaacctaaccaaggtcacaatgacccaagcccctggaatttcttagctggcagaaataactcccttacaaggccacaagacaacctaactgaataccaagaattcctagagggccaccctgccctagggtcatgaagataaaaacagactatcccactgagccaggagaccatctggacccaaagataagagatctccaaaggatctgtgactctggtcacgtacccaaacccctaaaagcctatggttttttctcctataaaaggagcctgctttagaggaacagggcttttctttgtctgtcggactgggaagcccgtttgcgcaaacgtcccataataaacttacctcttgtttttgcatcagctggactggacattgagtgtttttggggggatcgtccgatttgtagagactcctcggtccgagggtctttcactttcactgggtgagatggttgatgccacacaggcttgttgcctgaaaggaatgggttcactttgtcacggagctgaactcaccttgagcagaaagcagtcaggtgttttgcagccgctttgccctctttaaggtggaagcaaccatgtgacttgaacattatctttgccaattaaatcatgaaagaggaaatgtcatgtgactttacctccatcttggttaatgtaaccacaaggcataagtcaaaacagagacatccatttagcttcccagtcccactgaaccctcaagaggatgacaaaccctttttatattagactaaggaaaagacatccaacatcaaaagtgttcattttgtaattttaatgtttggttttgactggactgttattatatgatacagttattatatgatacagttactgacttctgttttttgaaacagggtttctctgtgtagcagctccagctgtcctgaaattagctctgtagaccagtctgtcctcaaactcacagagatacacctgcctctgccttctgaatgctgtgatcaaaggcatgcaccaccactgcctagccatttactgacttctaagaggacctgggactcaaggagtaaattgctaagtgctagacaagctgctgccagcaaggagctgttccacagggtctgtctgaatgcctactatttctgcatggtatcttcaggcctgttttctctaactggtaaaatgccccccaacccttatgtattccttacccttactagttttgttgttctgaggttgagagacccccaatcaagacaaccacatagccagtaaccaatgcccacacacagggtttattgattacaaccttgagcttggagcctcaaccagcattccaacacagcaggtgaaggagatcggcccaaatgctcagggtaaggagtttttaaaggaaaaaaagacacaagtaggcagcacatgtgttgagggccaaaaagaatctcaagcaagatcttgcacagccacctgctctgacctgttctaaccacaagatgttctttttagataagttgctcaaaacatgttttacaggatgttcctttacttctcggaatcggctgcggttggttggttgcagggacatgggccaaggccaaccttatcttcacttcctctaaaaattttccattcctcctaccctcctaccccaacccgagcaaaatcccctacatataagcaagctttacccttcaataaacgagaccttgatgcgactcagactaactctatctttctttatgcgcttggtctcatacccttctcgcccccattgacccctaggcgatacctcctcgtgacccaccaattacctggcctgctggacgggtcacagatgctttggcgtttcaggattgggtaaacgtttgtgacctttaaattcattggttagggtctagggtctaaaactgttactaacagttgcccacaaggaagcctggggagagtggatgtagtttatcaaagttagtcattggctgactacctgggcagggtctctttggggcaggctacatgtgtggtttttcttaggactgtttatagctactttcgctggagctgaggcagcccccggccaagtgtaaaaatggaggttttttctcaaaatggagtttgttctgttccttcaatttgactttgtttctgcctgaccttcaatatgttttttgtttgtttgtttggtgtttcgagacagggtttctctgtggctttggaggctgtcctggaagtagttcttgtagaccaggctggtctcgaactcacagagatccacctgcctctgcctctgcctctgcctcccaagtgtagggattaaaggcgtgtgccaccaacacccggcttgacctttagtaaacttcaatctgtttactaaatatctttgtcaagtttctcttttgtcaggtccaaagggtaccacgaccaataaaaggcaggcccactaactgctccgaaattgagtctagacccagctcaacctggactataggaggatttctggtgcttagaagccagcattcctcagtaacttgtgaatcccattgccatctatcaaacagaatcacttcccttacctctgtgaaaagagatgtatggctctccaactaacatgtacctgtggcacctatcatcaaatcaagggccatgctagcctgtaggccagtagttatctaccttcctaatgctgcaaccctttaatacagttcctcatgttgtggggaccccaaccataaaattatttttgtttctacttcataaatgtaattttgctattgttaagaacctgtgtgtgtgtgtgtgtgtgtgtgtgtgtgtgtgtgtgtgtgtgtgtgtgtgtgtgtgtgtgtgtgtgtgtgtgtgtgtgtgtgtgtgtgtgcgcgcgcgcgcgcgtatgtgtgttttccgatgatcttaggctaactctgtgaaagggttgtttggcctacaaggggtctttactgtgtctatcaaatataactttcacaacaagaatgataaaaatcataatcagaataagcaaagcattcaaaatcttgttatattaaaatgtatcttttatatgattagttatatatagagtatgtatgattttgtacttagtaccaagttgacttataagtactcatataaactacagtttataacttgacccaacttagttttgttcacatttaaactaaaattttaaaaaataaaacagtgatagacaaatatgcatttaattaatgtgacaatatagataaaataagaagagatggtggttaatgatcctaaatctttcattggacaatgaacataattgtttacattgtaatttgatttttgttaagggccatgggccctaaactatgggtttaaagcccatctttgtaagttcttttatgacctttaagttttcggcttaaaaccagctctgtgagcctcatataacctgtaattagatggtttggtcaaacggaactgctaactgcttctgttccgagaaagggcctggggctttcgctgttccggggaagaccacaagatgttctggctgataagaacactccagccccagcatacaccagatgttccttcctgttattcccccgcttacccaatttccttggtgcagggctatataagcccaatctgagccccaataaatagagaccttgacaattgcacagatggactctggtcccctcttttgcgcgcttggtctccttcccttctctcgcccatgactctttcaggcannnnnnnnnnnnnnnnnnnnnnnnnnnnnnnnnnnnnnnnnnnnnnnnnnnnnnnnnnnnnnnnnnnnnnnnnnnnnnnnnnnnnnnnnnnnnnnnnnnnnnnnnnnnnnnnnnnnnnnnnnnnnnnnnnnnnnnnnnnnnnnnnnnnnnnnnnnnnnnnnnnnnnnnnnnnnnnnnnnnnnnnnnnnnnnnnnnnnnnnnnnnnnnnnnnnnnnnnnnnnnnnnnnnnnnnnnnnnnnnnnnnnnnnnnnnnnnnnnnnnnnnnnnnnnnnnnnnnnnnnnnnnnnnnnnnnnnnnnnnnnnnnnnnnnnnnnnnnnnnnnnnnnnnnnnnnnnnnnnnnnnnnnnnnnnnnnnnnnnnnnnnnnnnnnnnnnnnnnnnnnnnnnnnnnnnnnnnnnnnnnnnnnnnnnnnnnnnnnnnnnnnnnnnnnnnnnnnnnnnnnnnnnnnnnnnnnnnnnnnnnnnnnnnnnnnnnnnnnnnnnnnnnnnnnnnnnnnnnnnnnnnnnnnnnnnnnnnnnnnnnnnnnnnnnnnnnnnnnnnnnnnnnnnnnnnnnnnnnnnnnnnnnnnnnnnnnnnnnnnnnnnnnnnnnnnnnnnnnnnnnnnnnnnnnnnnnnnnnnnnnnnnnnnnnnnnnnnnnnnnnnnnnnnnnnnnnnnnnnnnnnnnnnnnnnnnnnnnnnnnnnnnnnnnnnnnnnnnnnnnnnnnnnnnnnnnnnnnnnnnnnnnnnnnnnnnnnnnnnnnnnnnnnnnnnnnnnnnnnnnnnnnnnnnnnnnnnnnnnnnnnnnnnnnnnnnnnnnnnnnnnnnnnnnnnnnnnnnnnnnnnnnnnnnnnnnnnnnnnnnnnnnnnnnnnnnnnnnnnnnnnnnnnnnnnnnnnnnnnnnnnnnnnnnnnnnnnnnnnnnnnnnnnnnnnnnnnnnnnnnnnnnnnnnnnnnnnnnnnnnnnnnnnnnnnnnnnnnnnnnnnnnnnnnnnnnnnnnnnnnnnnnnnnnnnnnnnnnnnnnnnnnnnnnnnnnnnnnnnnnnnnnnnnnnnnnnnnnnnnnnnnnnnnnnnnnnnnnnnnnnnnnnnnnnnnnnnnnnnnnnnnnnnnnnnnnnnnnnnnnnnnnnnnnnnnnnnnnnnnnnnnnnnnnnnnnnnnnnnnnnnnnnnnnnnnnnnnnnnnnnnnnnnnnnnnnnnnnnnnnnnnnnnnnnnnnnnnnnnnnnnnnnnnnnnnnnnnnnnnnnnnnnnnnnnnnnnnnnnnnnnnnnnnnnnnnnnnnnnnnnnnnnnnnnnnnnnnnnnnnnnnnnnnnnnnnnnnnnnnnnnnnnnnnnnnnnnnnnnnnnnnnnnnnnnnnnnnnnnnnnnnnnnnnnnnnnnnnnnnnnnnnnnnnnnnnnnnnnnnnnnnnnnnnnnnnnnnnnnnnnnnnnnnnnnnnnnnnnnnnnnnnnnnnnnnnnnnnnnnnnnnnnnnnnnnnnnnnnnnnnnnnnnnnnnnnnnnnnnnnnnnnnnnnnnnnnnnnnnnnnnnnnnnnnnnnnnnnnnnnnnnnnnnnnnnnnnnnnnnnnnnnnnnnnnnnnnnnnnnnnnnnnnnnnnnnnnnnnnnnnnnncgtcatctctttgaaacttatcccaattctggttctacaacatggtccttttgcttgagggtataaattaactttaagagattatcactcctacttcgggacacctttgtcctatggtataatagacctccctttagtaatactttttttttttttttggtttttcgagacagggtttctctgtgtagctttggagcctatcctggcactcgatctggagaccagactggcctcgaactcacagagatctgcctgcctctgcctcccgagtgctgggattaaagtcgtgcaccaccaacgcccggctagataataatacttatatgtgtgcttttaaatgttttatgaataagtgaatgtatatataaatataaacatcttaaagatttttttcattttgaagattacaacttcttttaaaatgatatgttaaaaaattatatatatatttcttttgcgcgcttggtctccttcccatctctcacccatgactctttcaggcagccccccttcggaaccctgaatgactgacccaaggtacgggtcaagtggcgcctgaacagggacccgaagtacggtcagctgtcggacggcggaaagacagcccgggacaaagaggaccctgcagacggacagactccagccctctccaggtggaggtaaggtaccaatcattgccgtccaaatgtcatgggtactttcattagtaaggagttgcaatttataaggaaactcaagacaattcagggagaaaggagtaagagttaaaaagaaagataaaaaggagtaagagttaaaaaggagaagataaaaagaaataagagtcaaagtaagagtcaaaaagaaagatttagttcattttttctattttattgataaagcttgtctatggttgattttaacggggccagacatagctccccagacctgggaaaaggttgggagagttacttcgcccacagcagagaactcacaagccgcccacagcgagaaatgctgctggcagcatttcttagaggcagtcaagcttgggggctgcaacttacagccttgggagatgcctaatcaatgtatagaaatgctattgatacagccagacagaaactgtttttgagacttacaaagaagaaagggcaacatatttaagcttagatttgttcaaattttggatgctcatatacaacgattgactataagctactgtgttagaaatttcaattagggatttttcttttctacaagctgatcataacctaggcaaaaggagaaatgtgagacgtatgcaagttatgaatgaacggtgtggccacacctggattcgtgatgtgattgtgaatttacaaatgcaaatgaatgaaaatgtctaaattgccttggatatgattagagatatttatattgcctcggatatagttttaaaaatatcaaaatcactttaatatggtcaaaaagagcatccagtcagtcagtcaatgtcttaacaggagaaattatgatttgagccctaggagacagtcaattaaaaagttagcaatagcctatagcatttagcttagagacatgagaaatctatggatgattctataaaatttggcagatgagaggataaaggtcttaccaaatttttatggttaaaaaaaggaaatctagaaaattaaagttgaaacatgattttaaaaagggtttgtaagaagcctcaggaaagagccaacttgttagattcacagcttggcaggtcagctaacatgcaaatgaggtcttatcagcttgtcagcctcgaaggttagattagaaaaggctactcaaaaactctaaataaatctagagaattgttaaagacatatgttatattctaaagaaattaaggcttgatagataacaattggaaaagataatttaaaaatctttaaatgagtttttagaaattgttataaaatattcattggttaagtacctttttgggacatctaatgatagcctacatggtacagaaatgtcatatagattttagaaagtattttaggagaaaaccaagtatgatacatgnnnnnnnnnnnnnnnnnnnnnnnnnnnnnnnnnnnnnnnnnnnnnnnnnnnnnnnnnnnnnnnnnnnnnnnnnnnnnnntgtctttgctcaattttcaggaagaattgataatcaatttctagttcatggactgttacaatttgcactatacatccttttgtatttctaaattataaaaaagcagtcctataaaaatatactatgttaatttttaccaatggttctattgagagagtcacttgcataggtcattaataaaaagaaatagagcagacagctctgacttcagctcaaataatcaaactacaagctgttgcaatggtcttttaaatcctggtaaataattcatttaatttgtatactgacagtcactatgtttttaaggcttataaggtaacagaaacagtcccatgcacaggatctggtaatagccaagtcaaaatgttatttaagcaaattcaaaatgttactcacttaagagaattatcgtgtttatgggtcacacggggaacctattaaatagtcctttccctgattactggccaaatggaatgaattatctgattaacaaaatcagttggtttgccttaaatagaaaaggctcgacaggcttgtaacttttcttcatcataatagcaagtctaagtaagaaatttggcttaaccagagagactgctggtcaaatcatcaatcaatgtagaataggtccgcaatatggctatggctaatttaaggattaatcctcaaggcctgctccccaaccatttatggcgaatggatgtgactcacattacagagtttggcaagttaaaaatgtgccactccacaaacaggagaagccaccaggcatgttataagtcactatttaagatgttttgcttacatgggagtgccagaagttataaaaacagataatgggtctggatatactagcaaagctttccagcaattttgtgcttaattcccggagaccggtgctaccggaacagcccgtatggcctagtcccgaccagtgcgcgtggacctgcctgccgggcccgtagtggcgagagggctgggcctttgggcctttggggacgcagcatgctgctgacttgggggagtgaatcacctgcctccgagcttttatagcggcagtgagacatgaggcgagcccacagctcgggcggcggtggctcctgagccggcgggatgtacaggccaggcagtggtggcgcacgcctttaatcccagcactcaggaggctgagacaggagatcacttgagtccaggaattttgggttgtagtgcgctatgctgatcggatgtccgcactaagttcggcatcaatatggtgacctccagagagccggcggccaccaggttgcctaaggaggaggagttctatgccatacattgtttgtgttaaatttcctcatgtatgatgctacagaaaaatcagccgcgcatcgcctctggcatccatcaacggctcaaaattatgctcaagccttatggaaagatcccctaacttatatatggcacggacccgatccggtcctcatttggggaaaaggacatgcatggattttaatacagtccaataatgctagatggttgcctaaatgcctttttaatccacccaggggaagcccctgagaagctttctaattctgcttaattctagataaaagatgctgtctttctggctacttgggcgtttatcaccttcgattgctgttgccgctggaagcccttatcagatctacaactacacctggatgatcctcaaccgagccagtgatgctgccaatgcttcacaactattaccttattctctccttaattaaccctactgttcaggcccctcatcaagccagccactcccttatggaggactgttgggtctgctagtcttccacccctcccctttttcagggaattgcaggcatttgatccctaccttgcctgttctaccggattgactatttactacaaacaggactccaaaatctaaaggactctttggtttctctatctgaaatgatgttgcaaaataggaggtcttgacctggtctttcttagacggcctctatgcagctcttaaagaggaatgctgtttttataaagataaaactgagttagcaagataatattaaaaaaagtaaagaaaaatctagaggataaaaagaaacaaagagagcaacaagagtcctggtataaaaattggtttcaacctccccctggttttctactttgctcccatctctcctgggacctcttataggactattgctgctgatttcttttggccttccaaagaatgctcgctttataaaaagtcagatagattcacttctccctaaagattttgtctctgtacagtgacgagcagagcaaacaaggcaaccccttgggccatcaagagaggcttaatttttctaaactgttannnnnnnnnnnnnnnnnnnnnnnnnnnnnnnnnnnnnnnnnnnnnnnnnnnnnnnnnnnnnnnnnnnnnnnnnnnnnnnnnnnnnnnnnnnnnnnnnnnnnnnnnnnnnnnnnnnnnnnnnnnnnnnnnnnnnnnnnnnnnnnnnnnnnnnnnnnnnnnnnnnnnnnnnnnnnnnnnnnnnnnnnnnnnnnnnnnnnnnnnnnnnnnnnnnnnnnnnnnnnnnnnnnnnnnnnnnnnnnnnnnnnnnnnnnnnnnnnnnnnnnnnnnnnnnnnnnnnnnnnnnnnnnnnnnnnnnnnnnnnnnnnnnnnnnnnnnnnnnnnnnnnnnnnnnnnnnnnnnnnnnnnnnnnnnnnnnnnnnnnnnnnnnnnnnnnnnnnnnnnnnnnnnnnnnnnnnnnnnnnnnnnnnnnnnnnnnnnnnnnnnnnnnnnnnnnnnnnnnnnnnnnnnnnnnnnnnnnnnnnnnnnnnnnnnnnnnnnnnnnnnnnnnnnnnnnnnnnnnnnnnnnnnnnnnnnnnnnnnnnnnnnnnnnnnnnnnnnnnnnnnnnnnnnnnnnnnnnnnnnnnnnnnnnnnnnnnnnnnnnnnnnnnnnnnnnnnnnnnnnnnnnnnnnnnnnnnnnnnnnnnnnnnnnnnnnnnnnnnnnnnnnnnnnnnnnnnnnnnnnnnnnnnnnnnnnnnnnnnnnnnnnnnnnnnnnnnnnnnnnnnnnnnnnnnnnnnnnnnnnnnnnnnnnnnnnnnnnnnnnnnnnnnnnnnnnnnnnnnnnnnnnnnnnnnnnnnnnnnnnnnnnnnnnnnnnnnnnnnnnnnnnnnnnnnnnnnnnnnnnnnnnnnnnnnnnnnnnnnnnnnnnnnnnnnnnnnnnnnnnnnnnnnnnnnnnnnnnnnnnnnnnnnnnnnnnnnnnnnnnnnnnnnnnnnnnnnnnnnnnnnnnnnnnnnnnnnnnnnnnnnnnnnnnnnnnnnnnnnnnnnnnnnnttagggagcagacaaaaaacttcaatgacaaggatcttttttttctgaggtgggggttttaagacagggtttctctgtggctttggaggctatactggaactagctcttgtagaccaggctggtcttgaactcacagagatcctcctgcctctgtctcccgagtgctgagactaaaggtgtgtgccaccaccacccagtgacaagactcttcttaatgggctttttatttcacagatttatggaataaattttgaagcatcaagggagctgagaaactttagacaggttaggatctgggaagctcctgggaagcaggacaacaacctccactggtatttacaactttgatactgtaagagaacaaatctacagatggaatcttccacccgaaaatcacctcttctgccttagaaaatccccaaaccccttgcaccttgaaacacagtctctacccactccccaccccatagatggctgcccttcctttttctaattagaggacagtctacctctgtagaggtgagtctctcttcctgcctccctccctccctccttcgctccctctctcatttttgtttttgttattcaagacagggtttctctatatattccccgatgtcctggaactaacgctgtagaccaggctggccatgaactcggcctgctgagtgttggtattaaaggcatgtgctgactaagccttgcgcctctttcttcttttttatgttaccttcatcaatcctgatctgttagtaagctatttctgttcagggctgttttttctttgtaccttagccagagccaaatgaatggtagcttttaaaaattttgacccctttattctctgagtgattagagtaaattctcactgcttggcttaatttggtagaaacaattttgccatttcattgtagaattagtctttttttttttttttggtttttcgaaacagggtttctctgtgtagctttggagcctatcctggcactcgctctggagaccaggctggcctcgaactcacagagatctgcctgcctctgcctcccgagtgctgggattaaaggagtgagccaccaagtaactacagttcttacttgataactttttgttatatattttactatgttaatgttaaacccttctttttatttacacaggaaagaggagatggtgggggaagtccttctgtgtatatgtttgtcttattggttgatgaatacagcactgttggccaatagggaagcaagataggtgggactaggagttgaggaggattctgggaaatgtagtagaggagtcactatgtgatccaggaagagaggatgcatgaggctggcgtcctcagtaagataagaccttgagaggaatatatatatatattaatatatatatatattaattatgagttaaatatggcagagttagctaatagaagctgtcattgaccaacagtattgtaactaatatacgtctctgtgtgttatttgggggccctaaagaggtggcagaacccaggcggctggtggaaacagttatcgttacaattaatgattaagatacccccccccccaccccaccacagacccagggcaaccaataacacagtgccatcaggttagggctgaatgtcacattccacactatcaaagactaaactaaacaccaagccagccacaaaccctttgatttacaatggggtcctgcctgaaagatcacatagggcttgtggcacaaaacttgtgggagtaatcaaccaatatctgatttgacttaagatccactccatgagatggagcccatacccaacactgcttgggtgaccaagaaccacagactataatagcatggggacctagggtgaacccaagtaccactgttctaaaaaaaaaaaaaaaaaagtagtgatacaataacttctgatgatacgatatattctgctgtactcacagacagggccttgctaatccatcatcagagaagcttcctcctgcagcagatgggaacaaatacagaaatctacatccaggcattatgcaaagagtaagagaacttggaacattctgccctaaatgggaattctctatcaaatctcttccctcagggttcagagaaccctacagaagaggaagcagaaagagtgtaggaaccagaaggggtggaggccaccaagaaaatcctttaagtcaataccatcaaagctcatatgaactcacagagactgaagcagcaggcacagtgccagcaggagtctgctctaggtcctctgcatatatatattgcagctctagtttaatgtttttatgggatcaagagtattcaaaccagtaggtctctgattcttgtgcctcctcttggactcttttccttctttttgtttgtcttctccaactccaatgtgacagcttttattttatcttactatattttattattattgtgataaagaaattaaaaagactccaactgagcaagaaacctgtgatcctatgctacgaaacaggaggccacaagcagttccaaaaaataaaagggacatcagcacatcaccgactgtaaacgctggcccctagcccttgtctctaagtaaattagatggcctctttatctgcctgtcataaatcccccagactacagggcatgttaatcagcccccacctaaatcaaacgacagttatagcttctttgctcaatacctattatctttccataaccttgtacaaaagctttgtaactttgtatgaaactttgtaacatgagatcatggatctcatgaccctcttccccttttttgacttccctgtttgctctttaaaataccttgcatttgtggttcggggcttcatttctcccgacagagtgaagccccttcctggttagctggttttccttgaaataaacaaaccttgtacttgcattgcgatgtggttaaattccttgaagccttggggttcctctcttgttgggcacaacaattatcgattagaagtctgttctcttttaatgagagaaagggattggaactgtatgggaggggaggtgggaaggaattgagaggagaagagggaggggaacctataattatataattatatgagtaactaatctattttcaatacaaggaaaattttaaaaacaaaaacaaaggactgattctagacgatggggatcctgttgcaggggaaacaggaatgaggctatgtctcacattcggaacaaaacaaataatgctcatttatagaatctcaacctgaaccagtcaactcaaggggaagaaagctagtactcccagagctgatcagatagctagctggcttgaaagggggttttaggaagggcatgaggcacatatctttagtaccagcagaggcaggctgatctctgtgagtttgaagccagtctggttgacatatgtgagaccaaaatagtaacaatataccttgcaggtaaagggcactgtttgcagttaagacagttaaaaataagttcctgtttgtcctgtgttaagtccttgcaagttaagatttctatttgtgattaagaagaagttcctgtttcttagatttgatgtaaattgcaaaacatatttgtcaacctacactaaacttataacctcattcacatgatgtatgaccctaccattggtccttccctttcattgtatttttctaacaatgtgtaacagccaactctctcactcttgtaaacactttatctctcacataaaagggacctcaggaggctagcaggggctgctctttaaaatcctgacttagggagaggcagtcagaatgaccagtcctgggtgcacccaaaatacagcttgctttaattggataattgtgtatttggtctttctctcaattttcaggttaacaatagcaatttccaggtaagtcaaggttgcctattgaggccttgtctaaaagaaaggtgaggagagggggacttgaattgattcggatacaaagtggggaaatgtttggtaaatgttccttaaccacataattttattatttgtttatttgtttttctagacaaggtttctctatgtagctttggagcctgtcctagaacttcctctgtagaccaggctggcctggaactcacagagaccttcctgcccctggctcccaaatgctgggattaaaggtgtgtcaccactgccacctggcaaccgaaaaattttaaaggagctttgaaacaaagtcccattctataacccaagctgagcataaactggtcctgtaagtcaagttggtcctaaacttgaaccaatcctcctgcctcagcttctttaatgctgggattacagacatgtactattacatctttcttttaagtagaatatcttatgtgcaaacatcctgaccttgtacttgatgaactaaagggttgacctcatcatcttgtataaatgtcctgatctcttacttgtagtatgagaaattttaaagagaaagctggcacatatatttcttaagccattcctaaatttaatgttgtatctgaagtctcctgtgagtccaaactgagcattggatatttccaatactgcagtcagggtaggggtagagagctgagatagaaggatctcacatttcaggccagtgaaatatatagcaaggccctgcctcaaacacaccaagtgctggacatacaggtcagtggtagagttcttacctagtatgtaaaaggccctgaatttgattctcagcccaaattaaagaaagaaaaaaaaaggagtagaaagaaaaaggagtagaaagaaaaaggaaaagaaggatgtggaaaagggagaaatgattttatgtgttagatagtcaatgaaagggaaaaattaataaaagtctaaaacccggactccaaagcccaaatagaaaaactcctaagcttctctgagttcccaaaaggcagctcaacagacaaggttaaacaaaggtccacatgactcaaggccttagacagatatcaaacccttgagctgtgtagacattcctccagtccaaagaggatcagataattatcaattgtagaagtccctagcccaggaaataattaacatactcatttcctctgcagcatcctgcttaattacaccttgcctgaagcgtacaatcattgtcccatcctgtgtaaacatggaagttttataatcttgggtcttccagccctacaattttcccttataaaaacacccctcagtcaaaagtggggagtgtttccaaacgaatggggtccttgctgcagttcctatcctagagtcaataaagaaacctttgtccttgcatttggtgagtcgctctttgttggtggtttcttttgggtttccacaatctgggcacaacaggcaaaccattttattaactaatcttctgacctacataatgttactaaaactaattgtcctgggtatagtgtctaacacttataatctcgtcccaggaggatcgggaattgttattctcagctacatagtgaattgaaatgatgccgtgagaaggcttttattgtagaaataagagagtgaagtcatagataggcattggaagagtccagagaagggagagaaagttgtagtggtatctcatctgtgaacctgcaacaatggtcatgcctttggggaatggttacaggtgcagacgtgacccatttaaggtagaggagcagggaggaagccccttgggtctcagagagcataggggaaacagggtctgcatccttggagcaggaatgccgattattgttatctatgtaagttcattcccaacaaacacctatttatcattcatcttgggtttggtgaactaattgtaatcccttgccttcagaaagtaatacaataaacatggccagcaaactgaattgggtcaagaggaccaagaaccaggtttttaaaggacagagaactgtggggagggaagcaaagcccctggactggaaaggtttagggtaggaggcagggtggaaagtgctgaggagcccggatactggccagcatagactgattctgtgaggccagcatgcactttgttttttaatagccatttattctaagtttcttcagcaccttacattccaagttcagagccagtctgggctatgtaagagtatatttaaaaataaataaatagataaattaataaattagataatttgggccaggcttggtggtttccatctataatcctaccatttaagggatcagtataatttactggaaatgtgccaggaaaagagcaaatggggcagggagcaagtgaaattggtaaaaggactgaagggtgttagcattttcattatgatttaagttattaattgtatttttgaaagatttgtatttgttcttgtgtgcatgtgtatgtctgtgtgtgtgtgtgtgtgtgtgtgtgtgtgtgtctgaagaagcctaaagagggcatcagatactctggagcaagagttacaggtagttgtgaacttcccaacatgtttgctagaacctaggaactgaactcaggaaatctacaagagcaggaagtactattaaatgctaagccatctctccacttcctgtatttacttcttcattgttttatttatatttttatgtgtatgggtattttgccgacttgcatgtctgtacaccacatgcatgcctgttgcctacagaaactagaggagggcatcagatcttctgaaactggagttacaattttgagtcactgtgtgggtgctaggaattgaatctgtattcttcacaagaatattcaatgctcttaactctaagccatctcttgagctgcctgaggtgaggtctcagccatgctgggtgggcattgaactctttctgtacctgggaaggatcttgaactcctggctgtgggtgctgtaattgcaggcatgtaccaccatttcttttattattgttttgagacagagttccactttgtatccttgataggcctggaacttgctatgtagatgaggttggcctcaaactcacagagatccccctgctctgattccccagggctgagatcaaaggtatgcaccactatgtccagcctgtaacaccattccattttatgcggtgataggacttgaacacagggtcctgggcacgctaggcaagtactgtgctaactgaagtacatctccagcccagcatataaattttgtaaagctttcttggagaaggagttggtcaacagatacttttgggtaggagttatcaagattgttatgagggataggaaggaagggtggggttggggcaggaaatagtgtcaaaatttccttgataggctaagtaagtattgaaagaaagaaaaaaaagctgtggttttatctttcctgaacacaagggtctgattagagctcttgctgaaagacatcctgttttgcaaattgtaagttattttccatttctcaatgctgagagagatgagaagaaattgtattcttaaaaaagaatgggaggttattttagtaaaaagataagcatccaaaataaacaaacaaaaaatgaaaaaaatataaacaaccaaaaatgttcattgttttttgtttgttttgaaatagggtctcctatgtattcctgactggtttccaacgtacagaaaacctctctatctatttggcccagctggaccaaatctttcttgtctctaaaagcaggatgctttcattagatggactagttgaaacttgctgaatataagatgtcttccacaatgattctatatactctaacttcactataatgagtccttgtgcttgctaaatgacagaccaatgccatgacagttgacaatagccataatggcaactgaaaaggagtgaaaagaaggggcatttgaattcccatgaaatatcctcttattcccctactccctgaaaaaagagaaaagaaaatgtgtgcacactctttccagtcatctatcctttaatctcttctatttaagtctataatctctccacctccagtgtattgagaacttgattcatgagagcatttcccatatatttctgttactggccaaaagtaaaaatctcctttactgaacaattagtactcagttttgttactttttctataaatcagaggaaggaaaagggcccaggtagaggtcaaaacatagcataagttccttgaaatcagggatcatatattgttccaattttgaactttaaaggttcctgtagttatttctacacagtaaatattcaatgagctctggataaatgaataatgagagagtgaaaaatgatcttaagattccttccaattcatgtcaagagcaagagccatactaatatagcctagtttactattataattgttctattttattattatttttatgttgttagcttattgtgcctaatttataaataaaactttatcataggtatatattgataggaacacaaagcaaatagaggacacagtgtagttacgaaggtctgaggctagaaaggtctaacatggtggataaatgcaagttatgaaggtctgagaatggaaggtataaaggtctgaaaatggaaggtctaagatggttatgtaaggtgtatgaattaaagttatgaaggtctgaggataaaaaaggcttaagtgatgataaagtgagttgagacattaaaaagaatgaaatatgttcctgatttctctatttctcatgctactgttcatagtaaagttctacaataccactataggatcataactacaaggtcaagattaagatgcttttcattgtcctaaaaaaaatctgtcgattttaaaatggtaatgctttcagccaagttgcttctaataagaatatgctgctaatgtttctaatacttatgtttccacaaattctaaggattcttgtaagttccagggagctgaattggatccaaacaaacaggtcagattcactccagttattcaatctttccctggtcccaggactcccttccctcatgttgggactcttcgggaatgcctccctcatcttataatcatcccctcaagtgacaggacctaagaaaaaaattttttttctaaacttaaccttgtcctcggctgccaacatcttaacaagtctaagagacgccagggagttccatacagcctggactgcgatgaaacaaccagctaccccatgacgtggcagcaccccaaccttctcaggtcccccaaagatggtcaacgccaccccatgtcagtaggaagcagtcttgagaattcgatgcccttattccttaacctgccatgtctaacatctcaccctttttaataataagtagaggtgggaatgaaaggttcaggctttaatgctgatcagcaatatctctttaagagacagagcccgccccctgacaacagtcagggcacacacaggaaaacatactacgtcattaccatatcacccaccacgcattacagcctgcatgaggactctgggcatgcatggaacctcagtgcatatgtgcagtcttccctttaaaagttccaacttccctgctgctctctctctactctctctctctgcttcttcactctgctctttgctctctctcacctacgcactctctctctgcctctctgtggcaactggccatggtggtcagccatttgctctctttctcttcttctttagtctccctactctgctgggcctataataaactagtcaatatgtctcatcttgccccttcctctttttctttatatctaatttaaacaaaaacataacaactggcatgctgattgggcacaagattgttaaattctttcatcaggctagagaaatggctcaatggatgagagcactagctgctcttcaagaggacctggctttgattcccagcatatagatgatagctcataaacacttacaattccagttccaagggaactggtaccttcttctggcctaccttggcaccaggcacatatgtaaagaatatcatgcaagaaaaacattcatatatgtagttgtttgtttgattttttgagacagagtttctctgtttagcagcctggctgtcctgtatctcattctatagatcatgctgtccttgaactcacagagatctccctgcctctgcctcccaagtgctgggattaaaggcatgtgccaccactgcctggctaaattttttgaagttttaaatcctcctatgacaaaaaactcctgtcctcttgacctagttaccaaaagcaacttgaggaggaagggtttagttggcttacatttccgtatcattgttcatcatcatggagggaagtaaagacaggaactcaaacagggaagggacctggaggcaggagctgatgtagagactatggaggcatgctgcttactagcttgttccctgtggcttgctcagcctgctttcttaaagaacccaggacaactgactgtggggtccccccatccactatgggctgggcccttccccatcaatcactaacttgtgcctacagacttatctacagcctgatcttttgaacatattttctcaaccgaggccaacacgccagatcagaacttgaatccatcccaaactccccatctcattggcttccgtctcaaaacctcatctaataaaaaaaattgaggcttgaggctacccctccccacttcaaatacttgagtcagtcatgtagagctttctagctctcaaggtcctgagacaagcagatgccagctgccatctagaggagggaggagtgcctcctgtaactccagtaaattctaaacccatcttgggatggtttgaatgagagtgactcccataggttcatatatttaaattcttgttccccagtaatagaactgttttggggactattaggaggtgtggctttgttgaagactataaatggagttcttaattggtctagataataaaaacccagagtcagatatagagagaaatactgagagatcagagagaaggagcaagacacagcataccttacctccttagcatcagcagataagggagtaatttcctgtttctccctgcttatatcttgtttctgcccaactacctcacttcctgtctatctgtacagacctccagacctctatggttagttggtggcaaatttcattctctgacccccagacaggctttatttgtacaagcaagatatcaccacagaagaccactggaggtaataagctttgaagttttaaaagctcaagtcaagccaagtctttctctctgcctccaacttatggataaggatataagtatttggttgctgctctaaggccatgtttgcctgcctactgccatatttccttccatgatgatcatgaactctaaccctctgaaactgtaataaaacccccatttaaattatttattttggggggagggggttctagacagggtttctctgtgttgctttggagcctatcttggcactccctctgtagacaaggctggccttgaactcgcagagatctgcctgtctctgcctctgcctcccgagtgctgggattaaaggcatgtgccatcaatgcccggtaaattctttcttttataagttgtcttgttcatggtgtctcttcacagcaatagaaaaataactaagacatacctcatatagaaaatggatcatagcaatctatttcttacagcttaagtttgtttccacagccaaatgctctttacattcccaaaactaatgatatttgtgcccttttgtattacctttgcacttcttcccaattatcatatttctaagcatcagaactcgggcccttctcaaaccggtagatttgagtgggtgtagataatgtctattagtatcaactctttgcattaatccaagtgtcacttaagctgcaaagatgactcagaccaaacataatactaagaacatgctttctatcatatggaatactaaaattacccaaccatcctcccagtctttattgatttcttatgacctgaggacaggagacgatataggttccagtctttagaataccactgggtgtggtgacacacagctgtaatcttagcacatggaggcagaagcaggaggtggaatactcagactatcatgagccaaacaagagtcttttatttaaactagtaaccaagagtgagctcccaacacaaagaactctttgtcacaaagcaaagcaatacaaggtttagaaaggtaaaaccaggtatgggctaagggaaattcacaagtactctttctctgcaatgaaggaggaattctttgttctgtcaaacatttaacaggcatcatttttcagaaggaaagagggatcatttgtttttgttaaggaggaaggaggtatgaagtcaattatgggttcaggggtagcctgacttctcctaggtcatttcaaaggatttgtgaacatttaagccaggctggtttatactacatagcttttgtaggatttttcctagggagatgtgaacaaatgtctatccatcccagatatggcactagtgactgatcatataaatgattccatccaagcctacttaagttgaccaatgagtttattgtagttacttacaggaatatgggtgactcaaaggccactgcatcaaagaccatcctggcttgcatgggtgaccgttcacaaaagctgcctccctggaatttcctgaaaggcttgtagggagttgcaccagctggtgaatttcttctttctcataattgttactgcttatacaactggggtgtgtgcaactatatacataccatggtgcacatgtgcaggtcagaggacaacttataagagtcagttctctccttctaccatgtgggtcccaaggattgaactcaggttgtcagacttgatagcaagcacctgttgagtcatcttgctgaccctggtttcatgacttttctgagtcttatggaccttcttccttccaaagagaatgtttcaatttggaggaaggggctatacaacaataaggagaccctgtcttcataaattaataaatgaagaaagaatttagaatatcatgaaccaaaggtggtcagttaaaaggttagagggaaaaaatgaggaaaaagacaaaagtaacattctgcccactttgttggacttgggtttcatcagtcttttagagcagatcacaaagctcagggaaagacctgaattccatttgttactttattataaaggatacatgtaaagagatacagagggtaaattatactcaaatatatccttactaaacacactaccttccaagaacttccatgtgttctgccacttggggtttcctggaactccagttgctatgtgtttttatgaaaacctttttacatagataacactaatgaaatatctgacaaatgatgattaacagcctctctcttctttgggaaggctaagaagtcagaaagattctgacccattaccctgttttagtctttcttgtgaccagctcatcctgtggctctgtggggtctgtcagacatcagcccaatgaatagcactgtggtggctatttttgtaccaggcatccattttaatagtcctctgacctaaattcctgaaagataagctcccagaaactgcttccccctccctagaatagtgtaacagttacgaagtgattaacagctcactctggtttttgtaaacctgtctatcactgtggacagtggcagtgagtcaatccctcatatagctgtaaactccccagaaatgaaatagttgtgtttttttttattttaaaatccctttcctcaactccttctgggagtaatgccttcaatttgccataaggctgttgttctgctaccagtgttaataaattcatctgattatacgtggatttatattggtctttttcctaatggtcttgaactctgtaacagcacacagtaaaaacatacatatcattgtgaaaaattgaaagatttggggaattacatgtgtggaaacagggaagaaggcccaaatatatattagacaaaaccacagtagataagtgtcttagtcagtgttctattgctgtgaagaaacaccatgactacagcaactcttataaaagaaagcacttaagcgtgtctggctcatagtttcagaggtttagtccattgccatcatgtcagggagcacggcagaatgcacacagacatggtgctgtggaaatagctgagaattctatgtccagatccacaggcagcaggaagaaagaaaaaatgggcctggcttgaggtttggattcctcaaagcccaccaccagtgacgcttactccaacaagaccacacctacttcaacaaggccacacctcctaattcctctcaagtagtgccactccctgatgaccaaacattcaaatgtatgattctatgggaccattcttattcaaaccaccacaacatgtgtgagagtctgtgcaaggaagctatgaacttactatgaactatggatggggcagggtacaaaatgttcttcccatgaggttctagaaaaaattgcatcaactatgacaattagatgcacttgaaagcaaggacatgaaagggaatggccttacatattcacattatttctatgggaaaggtgaagtcctgggagaagtactcttagctctttcacatgaccaaagataatatcataaggcataataccaggtgtatccctttactgtgcttgcatttgcttaagctaactgtaaatatcacctcgtgcattgctttctttaataatataaatgagaattgttctatttgagcttcttttgtgttcaaatgccttaggcccactgatacgctactcctgttcagatcatagactcggtggcaagggtgggtagacagacacagaataaaaaaagaaggaacaaagagtttagctaagggtggggccatatgatttcagtctcaacactcaaaagtgcagaaggatgccacaaattccagcttagtctggcctgttaggtgagaccctgtcttatatcccacctctaaacatacacagaggaaaaaaagggaaatggaagaagcagaaagaaatagagagagaatattaagtagcctaatgttagaagtataaatgaatcaaattgaagacccagacataaattcagacacctatggacacctgacttttttttttaataaggaagccagaaataaacaatggaagaaaaagaaaacatcttcaacaaatagtactggtctgactggatgtctgcatgtagaagaatgcaaatagacccatatatatcaccctgtacaaaaaactcaagtccaagtggatcaaagacttcaacatagaaccagacacactgaacctgatagaagagaaatcagggaatagccttgaacttattgacatgggagacaacttccaaaatgaaaccctgatagtgcaggcactgcaatagacagtaacagggcctcatgagactgaaaagtttctgtaaggcagaggacactgtcaataggacaaaatggcagcttatagaatgggaaaagattttcagccattctacatctgccagagggctaatatccaaatatataaagaattcaagaaactagacatcaacaaaataaatactatttaaaagggaggtacagatctaaacagagaattttctttctgtgtttttttttttgtttgtttgttttgttttgttttttgtgggttttttttgttttttttttttggttttttttttttttttttttttttttggtttttcgagacagggtttctctgtgtggctttggagcctatcctggcactcgctctggagaccaggctggcctcgaactcacagagatccgcctgtctctgcctcctgagtgctgggattaaaggcggagaattttctatagaggaatttcaaatgactgagaaacacttaaagaaatattcaacaccttagttattccatcttatatctgccagatggtataatgtcacacaagtgacagctcatagttgctgttctgcaggagctacagctcgttcctgcaaaagccccatttatctctctccaaaccctaccctctcagagaatctccattggagaagagctgccaaaaaccccagtaccgcatcttggtggctagtagctcctcccctgaatttgccagcagcccaagacaccacctaaaagcataccgtagttggacacaaacccatgtcgtcactcctcgcctacaggatacataagcgacccacggtagatgggccatgtgattgtctcctgtatccatctctgggggttggcagaatcacccaggagttgctttgctcaaaatgtacctgttcttttactttttccattctgcttgatctcacttactgtattggctgagaaacctattattggggcacagaaaacctatcagttccaaaggtatggagccaggggaacactcctcgatgctggtgggagtgcaaacttgtatcaatataacagttcctcagaaaattgagaactgatctacctcaagacctagctatatcactcttgggcatatactcaaaagatactccaccctacttagggggtccctgcaagtttcataccaggaagcaaaccatgtgaagagataagaatgagaacctggtacagactgactttgtctacctggctcaaactttggagagtctaataacaagcggtttattcccaatgtattaagcccagtatgattttagaaaaaacgttccctgataaaatgcaatccctgttgcacaaggaattataattacattgaaattcaactcagggtacacatcatttcttccaagaagatggttctagagataggctatttgtactaacttaagggcctaagggcctaagggtctggcctggtctcagtcatacagataacatagagatcatttgggctattagccacttctggtcctggttgtgggagcttggatgagcctctggccataagggtcatttagattactagttacctccagtcttggttataagagtttgatatggcctggcccaatagataacatagatcactaatcagtcaatcatttccaattctcagctttctggatggaagaacaggtttttcatctttctcattgtaaaaacaatcctgtacgcacaaggacctttgtgctatgctcccaacaccctaccacaaggacacttgctcaaatttacccaaatatgctcatgatggctttattaacaatagagagaaactagaaataatttagatatccctcaaccaaagaatagataaagaaaatgtggtgcattttacccattggaggattactccactattacaaaaaagaaaggaagaaagaaagaaagaaagaaagaaagaaagaaagaaagaaagaaagatttgcaggcaaatgtatggaactagaaaaaaaaatccatcctgagtaaggcaacccagaaaaacaaacatatgtactcacttataagtagacactagctgtgaagtgaaggataatcatattacaatccataaactaggttccacagacccagggaggctaattaaccaggagagcttaaagagggatgcaagtgtctccctgggaaggagaaatagtatagattttgtgggtagactgggatcaggtggggatgggaacaggagggatcaagtgggggatggagggaggaagggagtatggagagagatgattggaataggggtaatttaggggtgctatggaaaaagtacagtggaaacttcttggaacataattagagtatggactagcaaggactgctcgtcatggagtctgtaccagccatcttctgtaaccaggcaaggcttccattggtgggaccagccacaaaacctttgacccacaatctgccctgcccacaagatgtggtagggaaaaggtggctcagaggtagaagaaatggacaactaataactgatctaatttgaggcccaagccacaagggggagcccatgtctgatcctgccctgatggccaggaacaggagggaaactgattagcccagaggcctaaggtagaacggaatatgactgaaaaaacaaacagaaaacaacaacaaaaatcagatgtttcctaatgatattctgctatattcatagatgagtgcctagcccaattgtcttcagggaggcttcctctaccagttgatgggagccgatgtagagaccagagcctgttaatcctaaaattttccagagaaaaactaatcccaccattttgaaccgtatttgaagcaagttttattaaaatattaaaaattgaccaagatggacattggtcaggactactcgctgtaatttcccagctgagtggccctgaaacatgtgctacagagttacttaaggaaaaacccacatgccattgtattttcccatgaggctttcctattttttttaagaactacaactcccaaaatctcagaagttatctggtttttggacaggtggggcttacaggttaacttgtggtattacaagccaaacattaggcagagctcagggaaccccaagaaaggaaaggaggaagaattgtaggaatccaaggtgttgaggacaccatgagaacacagccagtagaatcaactaagtagggctcataggggctcacagagacttaagcagatcacagagtctgcatgggtttgtgctaggtcctctgtatacctgttgtggttgtttagcttttggtttttggttttgctttttttgtgtgtgggattgggagtgtcagtcttttttgcttgtttgtaggatccttttcctccaactgtgttgcctcgtccaaccttgatctcagggtttgtgcctggtcttattgcatcttgttatgttgtgttcagttgatatcccagggaggcctgctcttttctgaagggaaatgtaagagcagtggatctggggcaaagggaaggtaatgggggaggctgggaggagtggatggaggggaggctgtagttgggatatattaaatgagagaagaataagtacaaagaagaaaaagaaacataagtgaaactattttatgtaaaaccattctgtgttactcagaataatttaattcttgcaagatacattaatgacccagcctcaaggtggctttgatatgtttgatatgttaatgaaccaaccctaagttgtgaaccttgatatcacaaaactaacgcccactggacaatacaaaaggcaggcactgctgggctcccaagatattgcatcaaaagcctcttattgagttcacacataactacctgtcagcatctgtcagctgcctgatgccctcaaaaaccttctagaacttccaaagtgttgaggaccaaataaatctgttatggaatgttttggggcccagcctctagctcctgcaaacaggaacacctgaaaactctggcccactattgtattgataaagccagtaaggctactattgtttaccatggcctcagggtaaatgcctcctattttcatctctataggcctaagcatctgaataggcctgcacctgggccaaggtgcaaggtgtgtgagtgactagggagtgaccagaagagagaggagaacaaagagaaaaatggttccctcctggtgttggcaggacggttaagaaacagcagaaaagatggctaataaagaaatgactcnnnnnnnnnnnnnnnnnnnnnnnnnnnnnnnnnnnnnnnnnnnnnnnnnnnnnnnnnnnnnnnnnnnnnnnnnnnnnnnnnnnnnnnnnnnnnnnnnnnnnccctgtctcaaaaaaccaaaaaaaaaaaaaaaaaaaaaaaaagactctagttctacaacatggaactgagagctctctaaagatgacaagatgtctgtgtttggtctttatcgccgctgggttgctaggagcttccaggtccacacccccccactcagcccgaacctcatggattaaggctgagacacgctgggtcacgacaccaaagaaaactctaattccccaaacttcaaaaggcagtgaatatgtccagaaatgacagtcttggcatagctaaagctgcactgtaggactgctaaaagccaacagccagcaaaatgggtttctgcctgccagagagagacgcttcccttggaatttatctgtggttgcatatcaaagctcatgctggcctctatgctccttcagtccctgttcgaacatacttgttacacattttgaagttcatgctagtctcctaacccttcttgtctcccaaactctaaactccacttctactatgctaccctaaggttgttgcagttcacaggcttccctcctcccagatacctgcttattctctatataaccactaccaccccactctaatattttcacttcttacatagatagatagtcctgaccatgtccagtctaatccccccccaatctattggactccttccagatacctctggatattctctcttttatcaacaatcaaaacttctccacaaatcttggagccaccacctccatgatttctttctgcaccctcacttatattcccagcctgccacagatgaaggatcttatagtggatgcacattgctcccaaagcatcttcaccaaagagggttccccccggtaaagcctgcagcatttcctgccattccctgctctggtgagatgtctgttttgatgagattaccataaactttaggatggcatggtattgtaagcaatgttttatgagaataaaccaagaatattcagaaggcagacatcatgtggacatcctagttgccaagcccctcaaagcccaccagctgagctcaataaacctaacatatatgaagcccaaagtttgatccttggcaagaacggtggtgggaaaccaagtagcctagaaataaaaaggcatactgtcttagtcactgttctattgcttgccccagccagcagggctgcaacaagagcccaaacctcaaaggacctggaatgaataggaacaagagacacaaagaaggcacaacaagacagggtttctgatcaagctgcaaatttttatttttctcagagaccttatatagtggttgaatcaggaagctttcagggcagaaactcggcagggagaggccatttgcctgataaccaaaccacagaatgtccctgtgagtgagtccttgaaggcaagcagagggtacagggtgctagctgataagactagttatgttggagagtatgtaggaggaagggttgctaagtaacctgaccttggaatgtttcttttctattagctaattctgtaaactcaggtgttatttatcaggaatttgtggagggaaggattgattgggactaaaggtagccattcttttaacataatgagctactttcaaaactgctgacaatcttcacaagaggtcctatacagcaatgatggttcctggcatagctattaagagacactatgaccacagcaactcttataaaaagaaagcatttaactgaggcttatgtatagtttcagaagtttagtccattatcatcatggcagagagcatggcacacaggtagagatggcactggagaagcagctgagagttctacagccagatccacagacagcaggaagtgatattggatctgacttgggcttttgaaacttcaaagcccatccccaatgacatacttcctccaacaaggccacacctcctagttcctctcaaaccacagtgcctcaccctgataacaaatcattcagatatatggacctatgggggttatattagtcagcattctctagagtcacagaatttatagaatgaatctctatacacacacacacacacacacacacacacacacacacacacacacacacacacacgaatttactggaatgacctaaaggctatagtccaacaataaccagctatgaatggaaaatccaagaatctggtagttgctcagtcccatgaggctgagtgctgttgggatccagcccccacggggtctctaagagttgttttccagcataaccataggtacctcctgttttcctaacctcaccccactaggatcaatatcctgttgacctggggtttttgtaagtttgtatataagacttttccacaataaaggtgggagacattctctcagaaagtggaccaggcacatccaaatctccaggctttcgcccgatacttagacttagtggtggccaagtgtggccacagggtgcctcatctggtctactgtatttgctggaatcctaaaaatgtaggctccaatgccagtgaaggaatggatgtgctgacaaggtaagggcaagcaggcaaaaaagaaccctcccttcttccattgtccttatataaccttcctacagaaagagtggcccagatgaaaggtgtgcctttctgcctcaagatctggatcacaagtgtgcccactatttctggattgtagttcattccagatatagccaacttgacaaccaagaatagccatcacaggggccattcttattcaaactaccacacataccgaggacctgacagtaaaagatatgagtctgtgtctcctttgaagttttaaattaattatataattctgtggttcttcttactgaacttggggtcatagtctacactatggcttccccaagaagccagattatatctttttttttttttctggagaaagaaatcaattaaaatagccaaatcaatagaaaaaaaaaagaatctgaaaaaggagacactgccgacactgttaagagagacaaagagagctaataagcacttccagtccatcttcagggccctgaagtgagattaaagttaaataggggcttgggatatgtccatctaagaagttctggttaatgtgtggtccttcccaccatgaacccattgaaagacccccagaggcttaggcccccaggatctcaggatctcagcccaggaccgaggccaccccaaccaccaggcagaggcaaaaacttgatgcaaacagcacgaggctttattgtagttgtttaacaagctaaccccatgttagctcaggcctttcatccatccaccatggcagatggctgggaaagatgcctccaagccatggcatggagatcttataggacagtgtaaggggcgtgtctaggggtacacacaggctcaggattggtgtgcctccaggcttggagggtttaccttttgttgattggtcaactggttgttatggcccataggccctcccagggtggttgctatgctctgcacgtcattgctgtgtacttgtccataaagcacacccagagccgtaaagcatagcactaccagctaacttctaattggttccttgccacgaggtaggtatctgacctcctagtgaccaaggcaaggtcaggcaagcatgtgttaggctgttaaggctgccgagctagacatcggtggcacacacctttaatcccagcactcaggaagcagaggcaggcggatctctgtgagttcgagaccagcctggtctacaagacctagttccaggacagcctccaaagccacagagaaaccctgcctcgaaaataaaataaaataaaaataaaacaaacaaacaaacaaaaggctgccgaaatggggagctggtcccttcaccatcagtttcttggcttccatctctccaggaaggtggtctgacaattttttgtgtgtgttttgtttggttggttggtttggttttttgagacagggtttctctgtggctttggaggctatcctggtactagctcttgtagaccaggttggcctggaactcacagagatccacctgcctctgcctcccaagcactgggattaaaggcctgcgccactactgcccagctggtctgacaagtttttattcttgtatgaaacctttctgaaagaaaagtttccactctgactggctccatgcttcagcattttcctcctccaagcatgagattcttgggaaaaatgaggctactggtgacatatcccccatccatataatggatacaccttaattaactgtgagggaccaaaaattaaaattaatcaaagtttaaaaacttaggctctgaaaagggaatgtctaatggaaaaagaaattttaactccttaaatcaggagtgccatggctggtgcctgatcccctgctctcagaaaaggggaggtaactgtccaccactcctgttaacattcctttgctaattgctggtcataaagatcccccagcccaagggataactgacagacactgtgactctgtaaccctgcaagcccatgccctgacttatctcagtcaaatgtatctcccttaaaatgtttagttactgactaactctgtacattgtgtgaccttaagtaaccatggaaactgtaatttgtggccttcaaccttatggtctgcccctttaaaagcttctctgtttggctggttggcatctcatttgcccaccatgcagtagaacctagctatccagattgaaataaaaagaaaccttttgcttttgcatcagagtgtcaactctttggattagtgtctgggatccgagaacctggcacaacaaaatgtatccatcctccctccatcctctaaatcaaatagcaccacatgttagattgttgggacccttttggggtctgctgatcatctgtgactaagggtgacccattgtgcccctggggtctgctgactgtcttgtgactaggtgtttactggggggaggggcagggcatgaactgaaagacccccctagcagacagagtagggcctagaatataggtgggttggttcaataactctgttccaggaactggctgaccacaaaagttatagccggttcagcaactctgttccaggaataggctaaccataaaaagttaggttagaatcttgtaaacgatcttaagaaacagggagtttccccttgtgatttccccttgggactttccactggtattcttggtatttttcagtaacaccctccctacccccttgcccctttgggctgtggtttcttcctttaaataccccttctcccagccattcagggtcaagctcctctacccctgcgtgggatatgagtctcggccccagcacgctggttcctgttaataaacctcgtgagattgcagcaaggactgtctctcctgagttcttgggtggtcgtatcatcccaagacttcagtgagggtctcccttcttagggggtctttcagaacctctgagctgaataaaattccactgtggctactgtttggtatggaaatctagtcccctttgaaataaatggcattctccttgcaagaatgaccagctgtcttgtctttatcaaattcttagattccctcgcccaaatctgtgagaagttgtagtgtgggcattacaatattagattattttttaagcagctatagagaagagaggacagaaagaaagagaagcttggtctgaccttatgaggaccaagagaacatcttgtcactcacatgtaaggatgccctaaatatctacagaggaagatgggattatgtcttttactggagtggaaagtagtctgcaaggtaagctgggaagtgtagtcctccagtgggaaactatccagaactacacagagaaacagtttctcattccccaccccctgagaggggggggggacacaccagaaggaggaggaaaacttggctctcacttcctgcttcccttttactttttttttttttttttggtgtttttttggtttttttgagacaggatttcctctgtgtagctttggagcctatcctggcactggctctggagaccaggctggcctcgaactcacagagatccacctgcctttgcctcgtgagtgctgggattaaaggcgtgcaccaccaatgccaggcacttttttttttttttaatttccttcttttctcaccccactcaagggacaggacctagagacttgtacctaccaggaaggaagcactctattatagaattctgttcccaggttttttgttttgttcaaagtttgtgaaagcatatcactatgtagcttattgatgcaaaaaacatagctctcatcttaaaaaggaataagggatagtttattctcaaaccatttttgaatgatcatgattcacaaaattcacagattaggttaccccaaattccatgttccaatgtggaagcagttttacaaagtttttatagttgaatggagcaaagaaagtcataaatcaaggtatggtgattcccttgcaggctttacagtaggcaggatgagaaaatgatccacagagagacaagaatgaaactcagctcagtctgattttattgtagccagtgctggacaaggacttctagaatatggcccagatcactttagccatatttaagcacagtacaattttggaaaaggtattctgttaacagttaactcagtcccaagtacacagcgatttaccacatgttcacattgagactccttacaaagtacatctggtttcttttgtaagaatgggtactgttgactcagagatagtgcccaagatttagggtctagggaggttgactgaagtaaacataatgccagtgagtgttaggattggcctggccctaagataacatagaagtcacttaggctgttgtaaagtacaagtgacctcactcataagagtggttttaaaaacaatgttcaagatttagggaaaaggatctctgataagttaaaacataaattctggaagataaggcagagcttgtctcatcagaccgcaaagatcaccaggatgtaaaacaacataattcctaaagttccagcaagagcagcttcctcacctcattcctctgaagaggttgaagggacctgctcccctttcggcagccataacagctgaacacgtgcttgccataaacttgccttggtcacttagaggtcagatgcctgtctcgtgacaaggaacccatcagaagttagtcactagaaagtcagatgcctgccttgtgacaaggaaccaatcagaagttagctggtggcgctgtgctttatgactctgggtgtgctttatggacaagtccacagcaatgatgtagagagcatagcaaccaccctgggagggcctatggnnnnnnnnnnnnnnnnnnnnnnnnnnnnnnnnnnnnnnnnnnnnnnnnnnnnnnnnnnnnnnnnnnnnnnnnnnnnnnnnnnnnnnnnnnnnnnnnnnnnnnnnnnnnnnnnnnnnnnnnnnnnnnnnnnnnnnnnnnnnnnnnnnnnnnnnnnnnnnnnnnnnnnnnnnnnnnnnnnnnnnnnnnnnnnnnnnnnnnnnnnnnnnnnnnnnnnnnnnnnnnnnnnnnnnnnnngcagcaagctctcgaatctgcctggtgattggggtgaccgagaacgtggcctgggaccccgggtacttgagttttccaggggtctaacaaggtaagctgtgtgttaaactcttctggcttccagtgcttttccatgtgcacaaggctctttgttctctacatcaatgtaagtttaaaatgaattggtgggcccggtgttggtggcgcaggcctttaatcccagcacttgggaggcagaggcaggaaggtctctctgagtttgtgaccagcctggtctccacagcgagtgccaggataggttccaaaactatacagagaaaccctgtctcaggggggaaaaaaaaatgaatgggtgggtacaccagaaaggcatgtatatcaagatggggggaggtattttataggcctaagaagctctctgatgatattcttagtgtgatggctaaagaactccattttatgctaagcatccattttggtactcattagccatctgtatttgattccagtctcgaatagataagttcccagtaaccctgactcagtgatccctacccaaaagtatacagctatgactatctatttatgatattgaagggactagctccccatttcggcagccataacagccaaacacatactcgcctgaccttgtcttggtcactaggaggtcagatgcctgccnnnnnnnnnnnnnnnnnnnnnnnnnnnnnnnnnnnnnnnnnnnnnnnnnnnnnnnnnnnnnnnnnnnnnnnnnnnnnnnnnnnnnnnnnnnnnnnnnnnnnnnnnnnnnnnnnnnnnnnnnnnnnnnnnnnnnnnnnnnnnnnnnnnnnnnnnnnnnnnnnnnnnnnnnnnnnnnnnnnnnnnnnnnnnnnnnnnnnnnnnnnnnnnnnnnnnnggatctctgtgagtttgaggccagcctggtctccagagtgagtgccaggatatgcgccaaagctacgaagagaaaccctgtctcgaaataaattaaataaataaataaataaataaataaataaataacctcttgctgtttgcatcaagttttcgcctctgcctggaggaagtcctgggccgaaatcctgggggcctgagcctccgggggtctttcaattaagctagatgcagattattttggaaaagaaaactctcttaggatattggagacattgccaggatacttctaaagtatcctttttacacatgttcctttattcacctcatctttttttctaaagaagaagggtctaatcctaacataaaactatctacaataagaacaacagccaggtgttggtggcacacaactttagtcctagcactcaggaggcagaggcaagcagatctctgtgagttagagaccagcctggtcctgttccaggacagcctccaaagccacagagaaaccctgtcttggaaacaaaacaaaacaaacaaacaaaaagaacaactatcaagtattgcacagaagaaagaaaaggtaataacataagcaaaggtgaaactacaaccagcaagtgtcagaagccagccttggcgacctcccatgcctagctagccgccagccagtctagcatcccacccctcaggttcccggacctggcctgagccgcaactaacacctattccttcccccgcttccttaacacaggggattccggatacctgcctgagagcaattaacattcattcctccccccacctcccttttctctgctttctcctttctctttagaaatccccttggtttcaataaagttggccttgacaagaaaacctgcttggtcccactctttctttcctgcccattattttcaggtgtgatccacctcggactcacgaattaccagagacactcaggacagggcaagcaagaacaacatcaaggaagaaatacattctaaatgtccaggccataggttactggcaaattacagagagtattctaatagctcttctatcctggagagtctaagtcttttacctaatatgccttggctaaagtgtgagaggattgtaactgtaactatctaatttttaaacccttcaaagacctgaaaaggaaaataatattacctgagcaatcaggaagtgcaagcaagcaatttccaaaagaagcaagaaatgacagaaatagctggctgcctagacagtcacccaaagtctgtctgtaacactggggcaaccaactttggatataggtctagaatatctgacagactattttcagaagcaggaaaattcgaaagactctcctaccctatcttggcaaggttcagcagttgtttttccctgagtcctgcttatctggattggacattgtgctactgtcaagagtcaagtcaagggcaggtctttgcccaataggccagttttgccaagaggaaaacaagttccttatggagtgttttctgtgccaaacatcatcttgggagtagattggtgcttctagaagtggtcatgactcacacatcaacaactgcaaaaaactgtttcatttactagagacatatgctagagcattgccagtcttaatttgtacaggtattcccatgatggccataacttctcacaggtgtgtaataaaagaatcagcctttttagaatcaaagcagctgcccagttaaatcttgaaaatgtatctattgtatggtgtacatattttaatttttcaaattctgtgaaatgaaacatatccctttgccaaatttcatttcttggcatacctttagggttactccatgtaggcaagggagtctaattatataaggaacaagtagttgactcgctatctctgagtcaacagtacccattcttttttctttctttctttcttttttttttttaacaattttcttggcttgttgccaagtgattgaaaaatcacttttcaaacctttggtgctaatatgatggttttttttttttatgaaattttgaggcctccagaacattttctattaataacatcaattccatcattaacttgtgctagaggacctggcagacctgtatgggatctgatgtgtgttacatacatctgatgatttctattcctgactacttcctgtaattgtataaataatgaagttaattctgactcatcaggaataagtttagtggtttctatatgtaaaataactctgtatattgagcatcagtaactatattgagaggttttataaaatcaattagtaccatgaaaattccatgcaattttgacttttgcacagaattatgagggctttgagccactttgcttagggtttctgatttgtaacctgccttttctgatttatttgcatcagtataaaacctaggggatccagagattggtgttccccatataatttgaggaaggatccaactggttctttttatgaatttaagtttcttacttttgggataactgctgttaatgtctcccccaaaaaaattactgtaagctctttgtcagttttcatttttctacccataaagaggaaatcttctctttattaaaaggtactatgatttctgttgggttcattcctgtcagttgacaaagtcttaattttccttttagaatcaaatcagaaacccattttcacatatatctttaatttcttactctgttggtgttgctaaaaatatccattccaagacaatatcttccctctgcattaaaatccctgtaggggaatgcttggagagctatatgtacagaatgcagttaagcttcagatccacatgatttatgtgggcattctgtaatttttctttcaccaaagccaattttctctcagcttctgctgataatttctggagtctatttaagtctttgttaccatctaaggtatggaacaaattatgcagtttttatccattagtttttatcccattagtgggccatagtttggagatgtctcctagcaatctttgaaagtcattgagagtctgcaatagatgtctcctgatttataacttttggggtcaaatttttgtaggcataatttgatattgtaagtaatataatagaactcttctttgtattttttaggtgaaatttgtaattcccaatgaggcaaactttcttgtttctttaaacatttttttcaaaagtatccatttttgaatcagctaataaggtatcattcatataatggtaaataatagatcacagaaactgtacaggaattattttgcacaaaatattggcacagagtcgggctatttaacattttctgtgggaggaccttccattaatatctctttaactgtctcagagttgttataagtaggtaccatgaagacaaatttttccctatcctttccttgtaaaggtatagtaaagaaacagtcttttaaatctataactataataagacatcctttaggtaacagaaaaggcaaaggaattccaaactgtagagagcccattggctgtatcaccttattaatagctcttagatctgttaccattctccattttccagatttctttttaataacaaatacaggattccaagggctggttgatttttcaagatgttgagcatttagctgctcctgaatcagctgttctaaggcctatagtttctctgatgtcataggccattacccaacccaaacaggtttatcagctaaccattttaaagttacggctgttggtacctctggaagatcaacagctgttgtgccctattagcttgggaggcagagggaggtggatcactgtgagtttgaggacagcgtggtctacagagtgaattccaggacagccaaggctatactgagaaaccctctcttgaaaaaccaaaacgaaggaaagaaaccatttagcagtaagagagttcaactctatcctgagtcattttagtgcctaaaacataattttaggcacagggtgttggaactcaacatcatgctgaccccaccccctgacaatgggtgggacatgcacagtggcatggctacgtcattgttgtgtcactcattatggggctgcataaggactcagtatgcatgtgcaaacttccccttttaagtgagcacctccacgtggtcactcttcactgtcttctcccttctctcttgctctacttcttcatatctctctctctctctctctcttgctctccactctttaataaactggttaatgtgtctcttctgttcatgtaccatctagcttgatcttaaacaaaagaacaacacaggtgcctaaaaaaaaaatcaataaatagatcaggcatggaggagcacacctttaatgccaatttccactgactttggagtaaaaagcagaagaatcacttgagcctagaaattgtagcccagcctggatagcacagcaaggtcctgttttaaaatgatttttattgtttaaattttaagacaaggtctcatactggccttaaactcactatgtagttgagaatgaccttgggctcctgattctctagcccccacctctcaagatcacaggcctgtgccaccatcattggctagcattgtctggtttttgttttgttttgtttttcgagacagggtttctttgtgtagctttagagcctatcctggcactagctctggagaccaggctggcctcgaactcacagagatctgcctgcctctgcctcctgagtgctgggattaaaggcatgtttgtttttgtttttgtttttgtttggggggttggttttttcgagtcagcgtttctctgtggctttggaggctgtcctggcactaactcttgtagatcaggctggtcttgaactcacagaggtccacctgtgtctgcctcccgagtgttgggattaaaggcatgcaccaccaccgcctggctgcattgtctgtttttaaagacaccaaaattgggcagcatactgtcttagttacttttctgttactgtgacaaaataccatgaccaaaataacttacaaaagaaagaatttaatttgagcatatggttcaaacagtttgagtctatgatggcagagtgaaggcatgacaacgggcagctgaatcagaagctgagagtcccctatatccacaagcagtaggcaggtagagcacactgggaatggtgtctttttaaaacacaaaacccatccccggtgacacacctcttccaataagacaacacctcctaattcttaccaaacagttccatcaactgtatttcaagtatctcaacataggaaccattcccattcattccatcacacatgcaagcctttcatttcttcctgagaggtctacaagtcagcggataattatgcttcagactggtgcttagcaatttaggctccaaagttctagttagtacagctgttttaaggctcaagctgaagaatccatgctttggtgggcatattgtgttgttcagctatctgaccacaaaagcaaataaagccaggaggcaagtcaagcctgcttagggcctcagttcacattcatttccattctcagtacttcactggccaaagcacaccataggaccaggtctaagtattacctgcccacagtagaaggggaagaagagtgaatatttactgaagaaaaagcaaggcaacaccctaacctttcattcagcactttactatagacagctgatgttcttggtgctgtcattatatgcaatgttatcaatgcacagaaaattatatatatttcttctatacccccttttcccacaaaagggtaatattcaattcaaattcctgttataatgtgttggggcccaaatattggaagtctattccatcctgccacaagttcagagagctcaagtcactcctattgtctttaagatattagcttgacagttgcagaatgtcctggcctcagtatagtgaatggctcctatctaaataacaatagacctaggcccaggagagtttacactaatcctgaaggctaggtgatatgagctgctatggagcacctgatggtagtacatgtgtctttaggattaagggaagtaactgctatctgccctttatacatgataatagaagtcttctgccattgttcccacctctggttggttacttaagattgaggcatgaataaactggacacattcattattaactgattctgccctccagatattatcctatgtctccatctttcctttaatgtctatagctagccttccctcatccatactcccccactcaggaacggacctggggctgtttggctggttccaattgcagccctgtaaacaccagtacatgacagtaatgggtattataaactttgaaattattccaaatatttacctgatttactataataagaacctggagtgttctctttctctttgtgagtctgacttttgttttcttgttttttttctttcctttttgttttttttttttttggggggggggggttgtttggtttttttcatgctggggattgaaaaccagaaccttgtgaatattaagcaagtttttatcacagagctacagccccaacttcctcttttagcaaactcagtatctgagaactcagggtaaactcacacttagaaatgcagtgttaaaacttgtcatacccaatatgtgagctactaaccttaatggtgtaggcttgactaacctcattttgttccctataatttacaacttgtttttacctctgtaattttatgattcacatgccttaaaaattgtttccattgttctgaaccatccccagggaactaactgaccacaaccccacaaacctgagcatttcccaggcttactcaaaatagctaactgccactttccctctttgtattgtgcttgcatccaaaaagtccatatctccaactcccataagattgttaagtcagaacagctgtaataaaccaatttgcattgcaacttcttggtgtgttctcatttggttccaacatcataacaaaaaacttcaattcaaagtgcctgagttgaatgggcatttgaagtacataaaccatgttaacatctctcttttttgcagagattagcagtgttttctaggcacaatgtgactattatttttgatttatacttcctctgattatttcagattttagcttgcacaaacattaattattttggttattatatctggaccattagtgtcacaaacagtcccaaaagcattgccaaggcagatgtggctattagggggtggaaggctgagaagtgtcaaggcacacacaaaattgagtcaggacaagatagtattaccttagtcacttcagtgatctacacccagtgatttgcttctcagaagacacttggcacagactgctgcagaccacaccttgttagttttcctgctaatctttgatgtcttatccagtccatgccagcacttgcactgccctaattcaacagaacatcatcaggcagagttcttatgaaaaaataaattttaggttgagagcatttttccatgcatcttcagtgttccaagatccaggaccatctttctaggaatgttcacacaggcaagaaaacagacagttaggaccttccctagagcaaatacatttgcatttgtggtggtttgaaagaaaatggcccccaaagggagtggcactattaggagatgtggccttgctggagaaagtgtggcactgtgggagcgggctttgagatttcttgctcaaaattccctcagtgtgacagtcagcttcctagtacctgcaagacatagcactctcagctccagcaccatgtctgcctacacaccaccatgttaaccatcatggtgataatggactgaacctctgaaactgtaaatgaattaccccaattaagagttttctttataagagttgctgtggtcgtggtcatggtgtctcttcacagcaataataaccctatgacagcattccttggttaaaaaagaaaagaaccaaacaatgacttttctaggagttgatagtaaaaccttcagaggctgatgcaggaggattaagttgaaggcccacagctggtcattgaaagacttaaaaattagcaaagaaatacagcccagaaactgaccaagactactactatgacttagtgcctggaatttaccagccaccaggattactcccttacaaggccataagataactgagtaccaagaattcccagatggccaccctccccgaggggctcgtgaaggaaacagattgccccactggccaatgtgtcaataattaagggtccctgtgaaacaaagagatagctacatatagttagcacatcctgaggtctgcaggtcagaaatctatctgattcccaggcctcccctcaagacaaagggcctcctaggaacccatgactcatgggttcaacagacagagagtcgaggcccctccctcagcttatgggtgagggctttaaaaaaggcctgtgcctgggggatggggctgctctctagcctgcatgctgggagagcctgtttgtacaaatatctacctttcattaaaacctcttgctgtttgcatcaagtttctgcctcctcatggtggttggggtggcagcagtctgggaaaagattctggaggcctgagcttccgtggggtcttacagtcatggtgacacacatttggaatccaactttggattccaactttcttggtgctcataaactctctaggcatgtctatgggcattttgtgtcagatttcaaatctccactgaatgatattgggtttgtaaacactcttcatgatatcttttttactctaatattcctaagtaatttaaatgttggcattgttgtgaaggattgtatagcatgataaataaaagacccagagacttctattggggttcaagcttcaaactgaagatcagaaaagaaaagcagccagccactagctcttacctttacctcagctcacactgaaggggcaatcttcaaactgctcctgatttcactgttcctcagattcactcagactgctatgttctcctcaatgtagctagagactaatcctaggactgaatgcctcttttatacctctcaaatcctgggtttaaaggtgtgaactctgattcactctcaggttgcccaggatgatcttggactcagagatccatctgcctttctcctgagtcctgggattaaaggtgtatactaccaccacctgacctctataagtgtcaggctggctttgctttctgaatcgtcaggcaagctttaataaatcataaatatcaccacaggattgtacctggaaagtggtgaaatgtatgtcccccaggaagacacaaggctgtgagcttaatgcattaatgcctaatgttcacacattgtaattcccccaaaatatcaaggttcatctagttaaatctgctaaaataaaacaaatattatataatgtttgaatcttaaagggtcatatttaacttttggagaatgagcatggtttgagacaagagtctcattctgtatctccaggtggcctggaatttaccatgtagcccagacaagaactgaactcttcctgtgtagtcccctgagtcttgggaacacagagtgtgagctacccagaaacccatttcttgaatcttgggctagtcttgtgacttgctttgaccaatacaattaaaacaaagtcatgccaagaacccatatatattcacatccaagtaacttgttatagattaacagagtgtgaccaaacagggtattttttttcccagtcagttcttttactgacaagctgcatattgtggttacaaagaaaggaccaatcactttattacttatcttgaaaagtaaccttatagggaatcttttttttttttttttttnnnnnnnnnnnnnnnnntgtgtagctttggagcctatcctggcactcaggctggcctcaaactcacagagatctgcctgcctctgcctcctgggtgctgggattaaaggcgtgcaccaccacccagcacctgaagtcattttcaaagctttgtttcaactataatgcactctgaaatctgtgaacacatctcccaacattaagattaaaagcatttgcactttctgtgacactgggactcttaatcattaacgtaagtcacagtctatacggtatcccaatagaaactcatgtgttctagctgtgtggcacctccttgtcttattttttatcctttgcagcatctgctttatcatatgcagaagcaacattttatcctacctttacctatgttaattttcctactaaactaacctctatcataatcccttactatatgtattaaaaaccctcaatcatcaaaatcctatttaaactaacactattattgtataaaatcattgcttcagttaaacagtacagcttaggagcatcttcataataatccacagctaaaagtgctcaatagaacaggatatttcccagagaggatcctactgcattaaggacagttgggatctcccaaacccattcacaccatgccagataccagagagaaatggcagcagcaaacatgcacaaacacagtagtagcaagaaacattctgggactgaggctcttgggggaccttgcctatctgagattcacccatcaaggttttgtttactggtgggcagatcccctgaagtccattgctatctgctcttcctctaatatggccactggcacatgacctctatacctcattctcccaagatctttttgttttggttctcctttacctttaccaccttaggatgctccatcaggcctactagaaagtgtgactattgtaaaaagagaccaatgagaaaccaggcaccattcagagttggagaagtcattcagtcttactatgccagcagattgaacttgagcaaacgctatgaggagatgggaactgacccataatcttttacatttttaggctaagtagtgtcatttctgacttttttttctgtcattgatgagctacactttcaccctacatgattgaggcccatgctcagaagtttgtcttcaatgagcacgtttactgatgtagaaacaataaggttagaatggctattgctaatgtctatttctaaagatacggaaggaggtttttagcctgttcagactaatgtatgttttctagagacaagggagaaattttagctgatacaggagtaaacacgaagcagaaaataacacacattgttttatctataagtttagtaaaaatgttaactcattctgatcctcttcattatttccccttttgttttgacactctcccttctcactctccctccctccctcccttcctcccttcctcccttcctctctctctccctcacactctcacactctcctacagaatctttactattaattattgcaggcactttgttagactcaggagcttactatataggccaggctggccttgagctcacagagatcttcctgcatctgcctcccaagcactgggattaaaggcctgtgctaccatatcaggcccttatactttcctaaagtatcaatttctgtgttttttaggttgataaactaacatttgaagtttgatggcctctatatgagaagagggaaccagacaggcaaattaaggaatcaggaccaaacaggaatatcataaaaagcttgagtagagggccaattaacagaagtagccagggtgcctaattcaaaatcttattccaataactccaggaatcaaatgcatagaggctatcaaacttcaatggaagaccggagtttatttgagcactagctcaagttgggcactctgctcagaaaggctgagttctccgttctccaactagtgcttgatgtctctttgttctacttatgtatgcaacaaggtggatgaagaggaagagttctaagtcaccatcagctatgaacaggttaaaggacagactggtagagggatttagaaagctggctcaagagtaagagcactttcagccgagcgtttgtggtgcacgcctttaatcccagcaccctggaggcagaggcaggcagatctctgtgagttcgagaccagcctggtctacaagcgctagttcattccagaacttgaggacgccacagccgtcaccccctcctctcgggccggtcagccgaaacgcgcaccatgggatccatcctgagtagcggcatcgcgggcgtggaggacatcgacattcaggccaactccacctaccgctatccccggaagtcggggtttctgtgtaataatcctggctgtcctggaactcactttgtagacaagattgacctcaaacgcagagatctacccattttgcctcctgagtgctgggattaaaggtgtgcaccaccaccaccaccaccaataggctagaagtggattgattgataatgaactctgaacctttgaaatcttacaatagcacagagagagaaggaaatctgaaacacttcaccctttttttcacaccttaaatcacttccttagacctttacaactttcatttatacaccttaaaccattttcttagacccttacaacttacataaaacttcaaaccatttcttttcatccagtcatttaccatgagacacttggttgatcacggagagaatagtaaaaagttacattggaaaaaaaaaaaaaaaagctagttccaggacagcctccaaaagccacagagaaaccctgtctcgaaaaacaaaaacaaaaacaaaacaaaaaaaaaaagagtaagagcactttttcttgcagaggacccgggtcctttcccagtacccagatggtggttcataaccacccatgacaccagttttggggaatctaacattcatttctgactgttaagggcactaggcatgtgcatagtctaaataggtacatatgggcaaaacactcatatacataagataaagtaaataaatctttaaaaacaacttttaaaaattaaaaggagaaagaaaaggggaaaataacgaggatagagggaaggagggaagaaaggggagatagaaggagggacaaaggcagagagagagagggaaaggcagaggaagggatgaaggaagggcagagatgatgatgcagacctttagttcaccatgtgggagccagaagcaggtgaatctcagagttcaaagctagctgggtttgcatagcaagttccaggtcatccagatctacattgtaagaccctggtctcaaaacatcatcatcatcatcatcatcatcatcatcatcaatcatcatcatcatcaaaataaagaaatgaaggaaagaaagagaaaggaaataaacgaacatctgatgggccagcacctacatgttttgaaatgtccacatggtgactcacagccatttgtaactctagttccaggaagttcaattctttcttttgacctccttggttaccaggtgtacagtggtctaaacaagaatatctttttttttttttttgagggaaggctttaatgtatttaagtttttggtattgtaacagagcccccagaccttagtagacccctggaccttagcacaactgactccatgacataagtgccattcaggctgtaaaactcagtacatagacagcaccacctgccaaaaaatgaaaacaaagacccaatccatcaaagtccatattatgggaaagtttcttaatgtactaactttgctttttgacttctggagtaatgcttctggataactgttcttgttaactgaagtatgtcatcctgagaatgctaaacatcatgctacactgggaacctgaacacctagtgtagttgctggtggagtaataaagactttctattgacttaaacctcatgccagtagttttctctagtgaataccccacaacacatataacctagattgatagggagggaacatagaagagaaaactgtgtgctaaaagtgttgctgactgttgctcatctggtgaagataccagagtatgatgtacttttcttgtatcttttctctagtttaatgttttgttttgtttttttcacaccaggcaaggtaatgttgtaagaaatgttgaataattaatctatcctgtaaaacactgttttttatgcttaccccttctctcttactgctgaaaacttacagattcccagatttgtttacttagttcaatgaccacttctaatgagattttatttcttctataaaacaatagcatgactacttccctttactaaaagaaggaatgtttgtttagccagatgtgaccatcctgaaatgattaaactgctctcactttctccctcttcttcaccctctccctctcctctttaaagccatttttcatactagctgatcaggtgtagacggtgagattgaaccttagacaataaacgaggaacaagttcctcctcattaagaataaaggtaatgataccttggccatgtgtgctgctatttcacttcagtgtcttgcatatattttcatcagtacaatttgccttgttgaaatgccttaatcagggtgggtgatggtctctttctctgcaacacagaatatttctagcaatgtacacctgtaatcccaacaatagggaggtagaggaaggagtattaggagctcaagaccatccttgaccacttggatacttggaggctagaatggaatacaggagactttatcaaaaacaaaacaaaaagtatgtacatgaagattgcatggcttatatcaaataccacacaattttatgtaaaggacatggacatctatggattctgatatctttgggatgtcacagcaacaggaaacacagcttagtgttactggtggtataacctgtgaagatctctcagagactcagaggcctctaccgagttgattgcaatggaattcttgatacaatttcacagaaaagacttccaagacaagtcaaagtgaagccaaatcaatgaatttattgattagcggaaaggatgaacagatgcacttcagagtcaggtgtgggctttgaaaaaggaacaaaccttggtgctgaagtggtttggaacttttggaacaatactgtttaaaggaaacaatctgtaactaaggttgacagggcaccaccccctccctccacaatatattgggttcctcatttcatttctgattcattatttttggtgatatatttggtgatatatgattgtaaggagccttgtaaccaagcaggcaaaggcctggttggaggggcttaggacagaggctacaacagggcaggcaaaggcctggctggaggaagattaaaggaaagggagcgtaggcccactacgcagcccattgtagataagagtgaggatgtgtggagtgtggcaaagtgtaattaacacgatttagcgaactatttaaggaccagctcagaactgggaattttagagtgtaccacgactctatgtcctggagctctcctccgctaacctaagacaaccagtccatcaacctgagtaccgcctgttctgagctcgattccagcagactcgccagcctgaatccagaggagctgaagtccggagcctgcaggctgctgcaggagaggtaccccctgctgtgaacctattgtctgtggttcttaggattgtttgcttatgtttgtgtgttgctttgacataagtgtgaagtaaaactcatatactcaaaaccaacttgctgagtttgtcattcctcccaggtcaaacctggtaacggcttaagacaatgatctaataaagattgcctaaagatcagaatacaaagctagccacatccatagaggccaggcaatggtactgtctgtatgcctttaatcccagcaccagagaggtctataagaccagagagcccagggtcccatgtggtattcagactgcaatcatgctgaagacaggattgccccagccctgatagaggtacaaactctctagtggttagctgctttgcttttctgatcttcagcttgaatctcagtacctgtctctgggtttttattattcgtgcttatattttctcgctgatgttatttttttgtttggttggtttggtttggtttttgagaaagtgtttctctgggcaacagacttagatgtcctagaactggctttgtagaccaggatggccttgaattcacagagatccacctgcctctgtctcctgagtgctgagattaaaggtgtgcaccatggttcttaatgttttgagccaaggattcactatgaaagattaggctggtctcaaacttgtaagaattctattgcctctgcctcccaaatgctgcgattataggtgtgtactgaaaaggcccaacaatatgaatattaattaaaaaatgacttctcttgggaactgggaagatggctcaacagtcaaaagcccaagattctcttctccatgacctgtgttcagttcccagaacctacagatagcttactaccatctgtaacttcaattctaggggatctgacatcttctggcctcctctagagccaacataattgaggttcacagacatacaagtaggggcaaaacatccatacacgtaaagtaaaaataaataaatcttttatgtaggaattaaagtttttgtttgtttgtttgttttgagataaggtctcactatgtagttcaagctatcctggaactcactttgtagaccatgctggcctcctagagcagaactgctacatatctgcagggaaaccaacccccaccagaatagagctatataggaattgcctggcttctgacaaccaggataccttttcctccagagctgtaacactcacaactcaatcctccatgaccatacataaaccctagcccctaaatagggatgttggacccccagattaggataccaaatagtcctggcagtcaccctgaagaaccaatatccagtccagtagatgcaatcagcaagaggaattttattgagcattttcgcaaacgggctccccagtcagacagacaggaagccccaagcaatgcaagcaggctccttttaaaggcaaaaaccacaaagcctaggggtatgagtcgttctctgattggaggactcaggttcgtgctcagggcatccattggggactttccgtgcaggggaacatgtggcggagctattgttctttttctgtaagctggctgtaaaaactttcccaacttcctgccctatctggctgtaacatctgcctcaacttcctgccctcaatgggggagttaggccccgaggatctttcaggaagagcagacagtttccttaatttctggtccatctctgtaagaccccccagaaccttaggcctccgggatctcagcccaggaccggggtcaccccaatcaccaggcagagtcgaaagcttgatgcaaactgcacaaggctttattatagttgtttaacaagctaaccccatgttagctcaggcctttcatccacctgatggtagatggctagaaagacagctcgaagtgtctgcatagagatcttatagggcagcataaggagagtgtctaggggtacgcacaggctcaggattggtgtgcctccaggcttggagggtttgccctgtgttgattggtcaactggttgttatgtcccataggccttcacagggtggttgctatgctctgcgcgtcattgctgtgcacttgtccgtaaagcacacccagagccgtaaagcatagcaccactagctaacttctgattggttccttgccacgaggcaggcatctgacttcctagtgactaagacaaggtcagacaagcacgcgttcggctgttatggctgccaaaatggggagtggtttcctcatgtctatagagagaataaatttcttggattttgctatcttggtgtaaatacctaatataagagtttcagtttccacctaagataagccaccacactggttcctgatttctttctttccttttcttctttccttcctttcttctattcaaggaatggattgaaaatgagacacagacattgttgtggacctggagacccaccagaaagatcatctggactctactgagttttaatcagctaaattttatttaagctgcagctgacagagcccttggttagactcaggactgcagccctgtctgggagagttttttcttgtttttttgttttgttttgttctttttaggcaaaaactacaattatttaattacttcccttctgtagacataagataacaacacacaaacagttactaagcaagtttacagaagtcataataagcagttagctaatcattttacaactacacatcctgggaaaggtcaaaagggtcagcatttcctggggttccaggagcagaattaacttgctagaattgacttcttagactcatgaccaggctttttctttgtttttgtttgtttggaattggcattacagacagttgtgagctgccatgtgggcacagggaattgaacccaggtactctggaaaagcagtcagtgctcttaaccactgagctatttctccagccccctggacaagttgtctttaagactaagtggcagaactctgtgagttcaaggtcagcctggtccacagagcaagttccaggacagccagtgtaagcccctgaaggcacacaagtgaccagacccctcccctgaggacctccaactgccaggttccaccaaaggacattccagttgccctaccagctggaccctacccccaccctataccatacaaagcccaagctctccccccctcccccccccccaagaacccctatataacccctgtcttctgttcagttttctgctgtttcttgcctgaatagaggcagccactatcctgggtttttttctttcccaataattctcttgtgtgaggtttgttgtgtgattcgactttgtggcattggctcccaactaccaggatgctttcccatctacatagaaaaactcgaaaaccccaaagcataccaaaagaaaacaaaacaggattggccatttgtaggtataagtaggagcatcaagaaaccaccaaacacaatcaaactccatggaaaaacaagtagcagctttaataaataataataataataaaataataataataataatactgccaagcctcctctgaccatagagaacaatacaccactgggaaagtttgttgggttatatagggacaaatagaagagggacacacatctcagatgctgaaatagccaagtagttaccttggggacaatggagatgcacctgttgtgggcagagagttccagtggccactgtttgggtccggagtcattaatataaaacattaccataggatcactctgccattcccctgtcttggagtcctaacagtggtaaggtcccatgggtccttaggagttagacttgaggcaggtccaatctgtggcatgtatcccaggataaatattaatgtggctcaacatatttacagtaatgttccaacatctaaaggttacacaccagctggtgagatggctcagtgggtaatagtactttgcattgtgtctaacaatgagtttgatccctgaaacacaacggtgttaggagagacccaagtcccacaagttgtcctttgaagtccacacacacacacaccatgtcacaagagtacacacacacaataactgtaaaaaacaaaaaaagttaaaaaataagattggacatgcctgctagatgtttgtatcagacttcacaagtcatggactgtgtcaaactctgtcaatttctgtttgaggggatttcagtgtctttgtctctacagataggctaaaattgatctttttgtctctacgggtagtatgaagttggtatttttcattgtgggaggcagaaacatctaaaaataacaagcagaatgaggaggatattttttcctattttgaattaaattttttcttttttttttctttttctttttttctaacatgtggtgttttacctgaatgcaatctgtgcctagtgcccaatctgtgcctagtgcccaagaggtcagaaaagggtatcaaattccctggaactggaattaaagactgttgtcactatgtgggttctgagaaccaaatttgggacctctggaagagcagtcactgctcttaaccactgagccatcattccaacatttttttcagatttttgagacagggtctctcactgtaaccccttcaagctgactagtctgttattgaggatataattgaaactccaacaacttatcaagtgacagtcgagccagctcagaatgaagagcaccattatcacttgccaactgtgacagacctgtgaatgtggcacttaccataacttcagagcctaccaaggagatggaatcttttctgacccagcaggagtccccaatgcatcatccagagtacactagagagggagaacctcttcttagtgagcaggaacagccagctcggccttctgagctgccaggtcaaacttcagaacatgctctggtacatatcaagtgcatcctccagcatcacaaatgtcacagttaaccctccagagctgattaatgaggttgaaacgtcaatccaactggggtttgaacctcctaagcatctcagctgagaagagcttcccttctgtttgtatgagtgtatacacttaaaatggacatgctcattctgtataattacaattattatatattttacatgtctacgtatattattacattatgaataagttgcattatttaagaaaagtaatttgtttatactctataacctattagaacaataaagtataataaaattcttttcttttttattaagagttaaaagttaagccaggtggcaatggtgcacgactttgatcccagcactcaggaggcagaggcaggtggatctctgtgagttccaggccagcctggtttacaaagtaagttcacaggctatatggtaagactctgtttaaactcattcagtcaaacgaagagagtttaaacatttttatcagcacagattaattataaaccatatagttttgctaatattttcataaatgaatataatgaattttgatcattttcacaaccccaaccctcattatcctttcttgtctcctactccctctgatgacctttgttagatcatgtgactttaagatcagatccaccacccagttgggtctgtcccttaaaaccaggaaattagccaggcattggtggcacacgcctttaatcccagcactcgggaggcagaggcaggcagatctctgtgagttcgagaccagcctggtctccagagtgagtgccaggataggttccaaaactacacagagaaaccctgtctcgataaaccaaaaccaaccaaccaaccaaacaaacaaacaaaaaagcagcgactcttctacagcagatccattaaaagaggatcctgcttgtgggaagccaggccccttcacgagactgtctctggcactatggcattctaagtttatgggttggtatggagtgttctcatctgaaagctaaacaatttcaatttagcgagattataaggaatatgtatcattcctgaaatcacataagagtgcatgtctcagctcttgctttaggagtactcagtggagatggctactgctatccgtaaaacgtgcgtttgaagtcggtggcgtccatgtctaaccagtgtcttgtatcacggaacccggcatcccactagcaaaagcaatgagttgccagcagcctttgcctgaacagtggtttagggagccaggctggcaggaggagcaggcaggacggggcaaccgtggacagcaagaactacaagtcccaggggacgtttcgcgcagctccgcccctgctccgaatgtggccaacccccaggccctactccgtgtgatgtcatttgggcttccgcgtcctgcgcgaccggaannnnnnnnnnnnnnnnnnnnnnnnnnnnnnnnnnnnnnnnnnnnnnnnnnnnnnnnnnnnnnnnnnnnnnnnnnnnnnnnnnnnnnnnnnnnnnnnnnnnnnnnnnnnnnnnnnnnnnnnnnnnnnnnnnnnnnnnnnnnnnnnnnnnnnnnnnnnnnnnnnnnnnnnnnnnnnnnnnnnnnnnnnnnnnnnnnnnnnnnnnnnnnnnnnnnnnnnnnnnnnnnnnnnnnnnnnnnnnnnnnnnnnnnnnnnnnnnnnnnnnnnnnnnnnnnnnnnnnnnnnnnnnnnnnnnnnnnncgatcccagcctcctgggaaccgaaacaagagggtttcctcgagttcgaggctagcggggttatgttgtgagacacagcccctctaaagcaaataaataaaaatttgaaaagctttgccgggcggttgtggctcacacctttaatcccagcattagagaggcagaggcaggcagatctttatgagttcgaggccagcctggtctgcagagcgaattctaggacagccaggtctgttacacagagaaaccctgtctagaaaacaaaacaaaaataaaaaatgaaagctacaaagacagactacttggttctattgatggcatctaacattccatgagcaaatgttatttcttgcctagcttccagtgttttcttctgaatttctttgttattttttttcctcatgagacagtcccatgtagtccatgctggccttgaacacacttccgctccctgaatgctgagattaaaggcatacactactatacacggtttacctaggcctcctgggtactaaataagcataataacaactcagctacatccccaacccttttgttttgaggcaagatctcatgtaggccaggatggtgtcagactcacataccaggctgactttgaactcttgagccttacttctgagtaagattacaggcttcagttattaccaccagcttgtcgcttttgcttttggcttttcgagcacaggatctcatgtagcccaggctggcgttggactcactacgaggcagaggatgaccctgaacttcagatccgtcctgcctgttcctcagagtgttgagtttaccaatatacattgacacacttgactctgtgggacagaacttaaaacactatttagtggaaaggaaataaagtaacagttcagaaaaattattggaaatttggaactaaaacaaaaggatgagtacatgatttgtattgtcataactggattttgttccttatgtaaaggtccattttgtcattaggcctagagtttgcaaccctttgagtgaggaactacagcctggaactaacagttggttgagcaagttgtttctgttttgtaacaaagtaaggatctcatgtcagagtagcattcagctatgccaaaaacaccaaagtccagcagatgggaatgtctatttaagaaacagggcttgatttacatcctgccttctgttccttacctcctccctgaccagcaccttgattagcacaacctaagagaaccctttagatccggcatctagtaatggtctttgaatagaggcaccaaggaaagagaagaatcaagtcaccatgccttctgcttatagcctgtataaagggcatggaagaaggaagctgggtctctgcctgcttgcacttgctcttgctagcaagtctattccttcactggcattagagccctacttcttcgggattccagtgtatactgaagaccagctgagacatccaccctcatggactgaacaaccactgattcttggattctgttgatagacaaccatcttgttggtctagctgaaccataccatgtagccattctaataaattccatgtatatattctttaagttctgttcctttagagaaccctaactgtaatgggtaggttttgtttctcaacttgacacaagctaaagtcatcagaggaaggagcttcagatgaggaaatacctcctataaggcattttctcatttagtgatcaatgagggaggacccagctcatggtgggtggtgccatccctgggctgatgctttgtgttctaaaagaaggtgggttgagcaaaccatggaaagcaagccagtaagcagtacctctccataccctctccatcagctcctacctcaagggtcttgccctgtttgagttcctgtcctgactttagtgatgaacaacaatgctaaagtgtgatccaaataaaccctttcctccccaacttgctttctagtcatattttgccacagcaatagaaatcctatgacactgactaatacagattttggtgcccgggagtggggtatgactggacaggccttgtcatgctgtttatttgagaaatatggaagactttgggactttggaaacattaagtggggcttactgggcttactactagtaggaacattgaagacagtgcagttgagtgcagtttgaactctggggtgcccagaaagaagcttcagaggagaaggatattagcaagtggtctaaagaccattcttaggatattttggcaaaaaatgtggcccttgtccaaaacaatctgcctgaggctaaattgaagagtttttggcagaagagatttcaagatagcctagcagtattgactatgttatggggttattagtaatcattttatatgcacatctataatgaaagatgaccaagctgaacacagtgttcaaggagacaaaaaaaaaaaaaagttgaaagaaaagcctggtgctaaatagaataaagagtgctgacctcaggggaagaccccacccagctaagcatccaacttatgaaaaggaattaaaggaaagctaagcagtgaaggaaaacatcaacaacagaaagcccatgcaaatgtcattgaagtagccatgttctaaccccagcaagaagaagaatttggccgcttcagccacttgcttccagctttagagtatataagaaatatatatatttcttatatatataaggatataagaaagagattatggaatctccctctgtggctaaggcaagccactaatgccaggggtgtccctctatggaggcccagaaaggacattgtgtgaaactgtgaagataaagcctggattgtcttggagaccccaatatattatagcacaaataacaaatttgtgggatacttgccaagaaaacctgaataccaagtgtggaaccaacacaagaaactgaagtatgttgcagtcaataaagctgaatttggggtttgccctgctagttttgatcatgatttgttccactatttcctcactatgctctctttcctcccttttggaatggtaatgtatattctgtgttgatggggaatgtactgtgtacatttatcttattgattgttaaataaaatactatttggccaatgagacagcaagtagacgggactaggagtcaaagaggattctgggaaatgtagtagagaagtgtgatccaggcaggaagtgacatagaaaggagtcctatatttaagcgaaggagaaacaggaagggcctctcttttcccctccactcctgctccagtggcacaatgtgatccaccagctaggagggacgccaatatggcgtctgataagtcttataaaatatatagatttataataattaagactgagctagcagatgaggaatcctagtcattggccaagcatcattgtacctaatacaagtttctgtgtattcatttgggccctaactcgggcgggcagcttgggtaaagctcacacatggcgctggggctcaggcagcttttggcggaaagatttatcaaaacactgtgtcattgttggaagtttctgatttgccttttgattttacaggggagttagagttcagagattgccatgagtctcagaagagactttgaactttgaacttttaaacagttttgagagtgggataaactatggggacttgtggagttatactgaatgcattttttacattatgatatagctacaagcctttaggggttgggagtggagtatggtggtttgaataagaatgcccccccataggctcataaatttgagtgtttggtcagagaaatgaaactctttgataggattagaaggattagaagttgtggtcttgttggaggaagtgtgtcactgaagggtggactttgaggtttcaaaagcccaagccagggccagtgacactctctctcattctacctatgggtcaggatgtagctcccagctagtactccagcaactgcctgcatgccatcatgataaatggattaaacatctaaaactgtaagcaagcccctattaaatgctttcttttagaagagttgccttggctgggcgttggtgcacgcctttaatcccacagagtcaggcggatctctgtgagttcgaggcctgcctggtctccagagagagtgccaggaaaggctccaaagctacacagagaaaccctgtcttgaaaaaaaacaaaaagaggaggaggaggaggtgctttggttatggtgtctcttcacagcaatagaatagtgactaagacagtgccaaaaatacacattagaaaaaaaggcagtctttttggcagctgattctgggaaggcatttagaaaaataaaactatatccctatcttcccatataaaaatcaacttagcgtggatcaaaggccttaatgccttaatgtaagacccaaaaccctgaaactgctagaggaaagcataggcatatgaatggactatctgaaaatgagtgcaataactcagagaaatagatcgaggaattggcaggtaggattgaatgagattaaaaaaagaaaagcaaaaaagtacctttgcaaagcaaaggaaatgggaagaaatattttgaggggaaaagatctttgccagctatacatctaatatctagattaatatctagaactcaaaaaatgaaaatatcaagggctggagagatggctcaatggataaagatgcatgtctccaagtcaattcaattcctgggagccacacaatgaaacaagagaagtgactctagtagatgggcctcggatttccacctgtgtacaatgactcatatatatattcacgacgacatatacacataaataaatgtgtgttaaaattttttgagaatattttatgtattagctagacaatagtgatgcaggcctttaatcacagcactcaggaggcagaggcaggcagatctctgagttcaaggccagcctggtctacagagtaagttccaggacagacttcaaagctacacagagaaacccttgtctcggaaaaaccagttatcaaggaggtatattgagaagtaaatatattgggatgctgttctaggaaattatcatacctcctttcacaatatcccttttatatgtccatgtggggttgtgtatacaagcatggacaaagaaagactgtgccctaggttaacataagacactaatggaggttagataacggcagaaaggggaggatggaaatattcaaaagaggaaagaaaaaaataaagattgcactaaaaaaatgataacaagtatacatcatcatttgtgcattaaaattcggtatatatagtggtatttgtagacagaatttgtaactacttggcacaggtatgagtttatcagatagttagaatttgaagctgtaagacatgttggtcacattgtaataaagagtctttattctttcagagaaatagtcaaagtggaaggctttatttagcacatttttggcaaagagcaatgcgtgaagagatagcgggacagaataaactctagagctgacagtgagagctataaggaggggtgtaaagtttgtatggcctttggcaactacacggcccaggctctaggattaaggttatttctggatatggttcagagaaaggcatcctgctcaaagggatttcttgctagtgtaggagaggataggtcagagagcctatttatcctgaaataatcaatgtgccataatgaaatcttggttaagttgtcctcaactgcttcagggtcttagtggttacctcatcctataattgcatatgcaggttactgatttgtactctccatagaatctttgtgattatacttttttctctagtcatttgttgcccatatacagtttttgaaaattgttttatgtgtatggacagcgtgctctgaatgtatggatgtcagtacaccacatacatagctggtgtctatggctgccagaagagggcataacactgtagtgatacattgtttattatttaataaagcttgcctggggatcagaatgcaaagctagccatactagttagctttagaggccaggcagtggtggtacccatctttaatcccaggactcaggagacaaaggcagatgaattttgtgagtccaagaccaccctgggctacacaagagtgaaccagtctaaaagagaaacagagctcatgcctttaattccagaactagagtgctatataaggaagaaacaaaaagtctcatgtgagattcagttcccagtcatatggaggacaggattcccatttcagacttggtaggcgtaagagctactggctggctgctttgcttttctgatcttcactgggtttttattattcatactacataagatcccctggaactagaattacagtaagctgtcatatgcattctgggaatcaaacccctgtcctctggaaaagcagccagtgcttttaatggatgaacaatctttccagtcctggttttggttttctgagatggagtctgatgtagctcaggttagtctccaactcactgatgataactcctgatctcctaccacttcctggtactagtgttacagtcatacactaccatgctctccttaaaatgtattttagtaaagtcaagcctgttatcctagaattctaattgtaagccaggaggactaggagttccaggtcatcctgtgctacagaacagtgggttagaggcaagcctcggctacatgagactctgtttcaaagcaaaattttaaaatacatattgacaaagggtatacagaggtaaagtggtaaagaaaaatgtcatgtcatatataactttacatacacagtgattatgaatcttgtcaagctaaatttgtaacttttatgaaaggactaactgctgacaagcaaattgttaagtgtaagtaaccagtgcagacacagtgtaatctactatattgtgtttgtatttcagatgtcttcggtgcctaataatcaatatttccagatatatctcagatattaaatatttgcctcccaacatcaaagatagactgattaaaataatgagcacccggggccggataacagattccaatataaatgaggtaagaatgtatacctatacaattatgcttcgttaaaagagagtatgtagtaagattgttaattgtcttaaaataggactctgacttgagaagccagcacccaccttcggacgtgtgctgtcttctgctatcctctcctcccttcccctcccccctctccctacacttcagtatatatcaaaacctttttattgtggttgctgcttttgagacagggtttcactgccctggatggccttgaactcatagcgatctgcctgcttagaaactgagccattatttattggcctcaaggaaatactgaacagtagatccccaaaacaatggacatgtactaactactccaaacaatgaaagacagttggacatggtagattatgcgtgtaattctagtactcaggagtcagaagcaggagatttgccatgagtttccagtcagcctgggctacatagtgagttctaggccagtatgtctctgaaaaaaaagaaaaaaaagaagaagaagaagatgaagaagaggaggaggaggaggaggaaaaaagaagggagtggagagatgtctcagcagctaaaattacttgctacttttctacaggtccagagttaagtaccctcatccacatcagaagccttaaaactgcctgtaactctggttcctagggatccaatgccaaccaagcctccttagtcacccacacacacattaaaaaaaaaaaaaaattggagctagagagatggctcagaggttaagaccagtgcttgctcttgcagaggtcctaaattcaattcccagcaaccacatggtagcttacaaccatccataatgagacctgttgccctcttctggcatgcagtcagaacactgtataaaaaataaaatctaaaataaaaaaataaatctaaaaaaaaatcttaaaaagacatggtgaggccaagcatgatggctttcacctttaatcctagcacgcaggatgcagaggcaggcatatctctgtgatttttgaggcctacctgctctagataatgagttccagaataaccagggatatatagagaccctgcctcaaaactacaataaaaaggtatggtggtctttatctataattccagcatttgagaggctgaggcaagaggatcaggagctcaaggccagtcttatctaaatagtgactttgaggataaaagttacatgagagtgtttcaggaaatcaaaaaagaggctggggttcaatggggaaaacacttgccaggcaagcctaatgacctgaattcagtccccaaaacctagttgaagaagagaataactctccaaaattgacctctgacctctatgcatgtactatgacatacaccacacacacacacacacacatacacacaaataatagtaataattatttttaaacaaaaaatatttttaaacaaaagactgaaaacatgttaaaagaagtaatactaggcccaggtatagtggtacaggcctttaatcccagcattaagaaggcagaggcagtgagttcgagatgagcaccaggccagccagggctagtaccctacaactaaataccttgcctgtaatatctagtatctaagagacaaatgctggaacacaaaaatgtgttcagtggctggagaatgaagaagtgggagctttgctcacaaatgaacatctccctgcagggacaatgcgagggtagagggactgataaatgtactttctgggaatcgacaaagatcttccaagaactcggtgccacctcgttctattccttttattatctgggacttctcttcatggtggctggtaggcatctttagccctaagtgggtctgagaaaagactagacaactctaggtcaagttaaccctgcatttctcagatgttcatcatgtctacatatagaactatgtaagatttaacccaaagatgaaggcaataaagagacagacataatctagagacagatgtcaagtgttgctttctatttagctcacccatcagacatttgttagcagcaatacttgtcaagtccctgcactgtaatctcagttaatgttaacacaacccccaggcaggggtgttatcttcctcacagctagtggtgttgtctgcctaatattgctcagctatgtgacctgcaaaattgggatttttcacttaactaagagctggcaatgctagaagagtcgtttaggtttttcagtgacagtaaaggagagatatgtatcctaaagggattggttatccctgtacctaccatcaggtcatttgactgagaatgtttgaaaggatcttgcctttttccttggaaacagtacctgctgatcagaagcacataggtccagttgagtgagtcagaaatgccagtaggagataaccaatactgtggtctccagggtcctttctctgcaccagcgacttcagtgttgaagactttaagcactgaatgttgcagttccagctagaagctaacttgtttttgttgtttgtttgtttgtttgtttttcctgcttcatcttctctgcatggattaaatcctacattcttggctatatttctcatcaaccacctgttaccaccaccagatgtggaatacatgcgcttacagaaaacttaacttggggcctagagagatggcttagagttgcaaaagtcttttttcttttattaatttttttcaaaatcatgtatttgttacaggtgttacatcccgaagtccaaagactagatctgaggagctgtgatatctcagacttggctctccagcacctgtgtaaatgcagaaaactgaaggcactaaatctaaaatcctccagagaacatagaaatagcataacatcagaaggtatgtttatgatcactgagtccatgggcaggcctatacttggcacctgatacaatttttgagcaaagaagaaaaaatatcttagaggagaatataaaggtaccaacaaagtggggagagggagaagttagaggagaatatgagcaaggtacaaaggcatatatgtatgaaaatgttaaaatgaaacattattttgtatgttaattaaattttttaaaaagagagaaagaggatatgagctaggcatataactgtaattctagtactaagagaggcagagaaaagatcattgcaaatttgaggctttacatagcaagtttcaagctagcctgtgcctacatagcaagagcatataaagagtatacacacacacacacatatatacatatacatatcagtaaaactaatcagactaaaaaaataaatcagagtaagaagaaaaataattcaaattagaattcttgataaccatttaagaaacatgttaagtacctgccttatattttaaacatatttgaaataatactacagtattttaaacattttgcctgttatagtataagatatggccagttgatatttggttaaggttaaggtctttgttgttagccaggtgtgataacaaaagcctgtgatctctatatttgggaggtagcagcaggaggatcaagagtttaaggacagccaggtggtggtggcgaacgcctttgatcccagcacttgagaggcagaggcaggcggatctctgtgagtttgagaccagcctggtctacaagagctagttccaggacagcctccaaagccacagagaaaccctgtctcaaaaaaccaaaaaaaaaaaaaaaaaaaggaaaaaagaaaaagagtttaaggacagcctgagctacgtagccagtttgaggtcagcctggaatactatgaaactgttacaaaaagaaagcgaaaactattgttttggttttttgggttaggtcttagtatattgctgttggctggcttggtattcactttgtagaccagtttatcgtggaactcttagtaatcctcttgcctcaacctctggtgtggtcaaggcactttgcttgttatttatttgtttattgtttgttgagataggatctcactacatccctggctggcctcaaactcatagagatcctcttgcaatctgcctcctgggtgctggaaataaaggcttttaccactacttttttgatgcagtattagaaacaatcatcagattaagatgggtggggtggctcttatttgtaaacccaacacttgaagggtgaaggcagatagatcaagagatcaggggcattctcagccagctatatattgaattttagacttggtgatctacaagatactctatctcaaaaggccaagataaatcagataaacgaggcaatctttataaaactgtctaaaactaaaaccagaaaatttaaggaaggttgtggctaagaggatgacttagaagnnnnnnnnnncagttaagagcacttgctgctcttgtagaggaaccaagttgacccgaatggctgcttacagcacccacattgctgtaacatcagttccatagaatccaataccttcttctcaactctttgggcaccacatacacatgccacacagatatacattcaggaacaacatctatacatataaaataaaaatttaaaaatgactatgattgggaacagaatctaacacagtatatttatatctaaacggtatatttattatgaagggatactcacacaagaagccgataaccagattggcactccgagcagcccagtctcagatgcactccgagacctggcttgaaccccaaaagagggcaagagcctcctctttccttagttcttttatcccatcccttctgtgtacctgtgaccacctgtgattgggcatggtgggattctccctacatgactatgcagtacatgttttatatccagactattttctcagagtaattacatgaaatagtggatttttatatttggttaagttttttggggttttcattttttttctagtatagatcatttttcagttcaggatttgaactttattctttttcagtacaataaagaagtacttagctggatataggtagcatacacctgtaatcccaacactcagaagtctgaggcagaaggacctgaagtttcaggctgcttgggctctgttatgagactgtctcaaagaaaaggaaggaaggcagggaggaaggaagaaaggaattacttgcataagtaggtttctggataatcgtttgactagttgactgtattccccaatcattttggttatccacttgggatactcataatactttaaacaaatgtgtttttaaatggttacaagaaaaataactcactaaaaaaagagccctggaaaaaagtacagccattctgatagtaaataagtatatttctctatacaaagcaattatcttactctccatataccagctgggtggtttttgcatttttaatttatttcctggctgtgtatgtccctgtagaggtcagaggacagcttgggggagttggttctttgttcccaccatgtggattccagggattttgcagcaagaacctttgcttactgagccatcttgccagccccagttgtatttcttactatttaattaaggtctgtcattatctacttggagttagaatcacatgccacagctaaatctgcattgcaagactgtctccagttcatatgccagtccccaagacctgacctccagtaggtacttctgactaatcagctatacagaatttctgcaacttattccttgtgacagggcaaaggttcctccatgttgtcccagctggaaccatctttggtctaactgactccaccctttcctaaacctgcagtgaaaagtcccatgggaaagtaaccaaccctgttctagaaaaatcaaaatcaaaatccccagctaactgcatgatttttgcttctgttgaactgcttgcttgctttacttccccctgcaactgccaattagagtttggtttttctgtgttgtttttattttttattttattttattttattttttcctttaaaagctccctgtaaaatgcattcgaggctgctctgctctgcaggactgtttctctccagctaaataaagactcttaaattcacactttggtggtgctgagtggtctctgggtcacaaccctgcaacactcctcaggatttaataacttgtcattgtggctcacaaaactcaggaatacacttgtgctttgttataatccatgtgagaaagttatagaccatcactaatataagaccaaataagagtcctttatttaagccagagcaggctcttgtcacaaagaattcccagccagaagttcagagatgcagcatttataaagataaaaaacacaacagtatcattgttaggtgtaggttagggaaccttgtaacattcgttttgacagaacacagtagttgttttggttatccatttagtagtcattttggttaaacatctgggctatggttagggtcgtggaaatgtactgccaagatagatatagtcattcaaggggtgggttttcagttgaaagaatacctcaacagacacaaaatggggtcaaggtaaggtcaggacaggatggtgttaccttagtcacttgagtggatgtttactagttgattgcaaatggtatttataaaagacacagatgaatagccacacaaagagaacattggggagggtctagaaggatccccaggacaggagcttttgccccaacagatatggaattttaagtcaatagcccagctctggcagccctagaaacctagactgtgtcacccataccaaattaccagtgaaggaaatgagtaatgatgaaaaccagagaaaggagatttaatcagtgtacattggaagagcagataaagaggtccagggatcccaagttcatctttaggggttctgacacaagctttaggcttaagtagagaaagatttagggcaggatagcaagacagatgcctaattaagtattagtcctggtcaagataaggttccacctatcactgaccaattctgctctggtaccacaaggtattggaatggttaactctgctataacctaagggaaccaatctgtttcctacatatggtacttttactacagagtgaagcctcaccttcatgagtaattctcctattctcaaatagtttgccctctgagatttggctctttaaatcaaggatggctgtaggtttaagacagttatttatcactgtactttaagtcagtgttacaagtaggtcagagccaaatgtttctagattcttggcgtcttattcaaagaactaaaagctggggggggcctcacagatttgcaaaggaggtatgataattttattcagaatgaagtcaaagtacggattatagaaagatatactctcaagattgactatggatcactcaggaatatttaaggaacccaagctacagctttggttttctttttttagagttgtaagggacagtttagaaaaggtcacaccttgcattnnnnnnnnnnttaactgattagaacttcagtgagtgtgcaaagttggaatgttgtatgtccagagtcaaattacagttacttttagctctcttaatagacatttgttgccttcctctgtgtgtcatctaaagataaatcctttggaatataaaaacaaactccttatttccaccaatccaaaaactgagcatgccaacagatagcatctgaggtataatttccttttccccccctataacccacctaaataatgtgcccatcaatgcattttaaaagtgccctaattcagccgggcattggtggtgcacgcctttaatcccagcactcgggaggcagaggcaggcagatctctgtgagttcgaggccagcctggtctccagagcgagtgccaggataggctccaaagctacacagagaaaccctgtctcgaaaaaccaaaaacaagggccctaattcaggattattttagttttgttacgataaaaaataccatgaaactgctaacttgggatgtggaattgggaataacctgactagtgttcagggccatggtcattcatatcaggctctagaataaactatctctaatccctttcaggtaagaatagtgtttttgcatcagttaaatctaaagaagggctgacgactaaagggcatagtttaggtggttttctattttgattgctagattagatcatatattaatttttcctattgtgcatgtcccttcccataattccccttccctgcccaattatgcataggcacaaaatggtgaataggggattctccctgaaagtttactaacagacacaattttgccttatggtgatatagcccaaactagtgcatcctgaattaactcttctattctttgtacctggatatactagaaatacttttgttcctggggtcttggagagggtctgtactatttttcagaagtagcctgatggaggtgggaggcttaaagagttctgagattgctagacatatttgtgcatagaatgcacagataaaggagctgggctgccacgtgcattattataagaggaaggagtgtttacaatcaaaaccaaagagagttcctggctgaactatatctcctatgttgcctgcctcaaaagtaaaagttacagacataaaacaagggaaagatgtcaggcttatatcctacttttagtcaccttgtcagtctgagtgaataggcagtccttttttaacaaaagcagttttaacaaaagcctatttcaatatcactaaaaaattagtgtatcttcatggggggtagggtatgtcctttggtatgctgtggatgtttcttttattggttgatgaataaagctgttttggccaatggacaggcaggatgtagccaggcaggaaatataggcagggttaccagactacaagtattctgggaagaggaacacagagtgagtctcgaggaagacaccatgtagcttctgagacagagcaacaggcctggctatcaccggtagtaagccaaaaccatgtggagatacacagattaatagaaatgggttaataattgagagagagctagccattaagaagtctgagccattggccaaacagttaatatcaatataagtccatgtgagtttatttgggactaaacagctgcaggaccaggtgggacagaaacttcagtttacaataggtatctaacaggacttttccttttgatttgccctctgcttcttttcccttttgcctatccattcctcttagccttttgttgaaaatatgttaattgccaaatctttctgaagagccatggaacccagaatatctagcctttatagtgcccttccttagtttttaacatgcagaatatgtctaagacaggaagcaagccatggtgactcacatatgtaattccagcactctagaagctgagacagggtgattgttgtgagttcaaggccagcctggactacccagtgactccctgcctgaaaagaaagaagaggggggggtggatgaatgtataaataaaagaaagagctacagaaggtctatgtccattgtgatgttctgaccagagaaaaagagaggaacccaggatgatgcatgatggcaaactcctcatccctcccctagcccttgcctaccaagaaaagcccgtaaattatgctttcttgagaatcctacactctgtgtagtagaacttcctcctgatttcttacttggtctctgagttctttgccagtgacaggaacttggaaatacctggtagaaaacttaatttgggctttttttgggggggtggttcgagacagggtttctctgtgtagttttggagcctatcctggcactcgctcttgagaccaggctggccttgaattcagagatctgcctgcctctgcctctgcctcccaagtgctgggattaaaggagtgcaccaccaacgcccagcttaatctgggctttttacctctaagaattcccccactagccctcactaccaacaaaactgctacctccataaatctactttccttgcctctaccccttgtcctggatatactttgcctgttgtgggatggactacttcgaaaatgactaacatacagttggagattgctaaaaatgaaaatctgcatgcctttaatcccagcgctcgggaggcaaaggcagacagatctctgagtttaaggccgccctggtgaacagagctagttccaggaaagctagagctgttacacagagaaaccctgtctcaaaaaaaggaaatctgtcttagtcacatttcttacatatacgcgcatgctcacgcacatacacacacacacacatacacacactacagctcagtgatagagcatttgccaattttataatgatgcaagataatgacctcacttgaaggaggtaagaaattatttattctgaatatgggtaacctaggatactggttccaatttctcagaaaaaaactaatgactttaaaatacaatagtactagaaaacattgcatccagcgactacatttggtgggcataaatcatatcactagtttgaggtaaagcaaggaaactctgaccattggacttagatagcatcttactgcattcctagtgtggtaattactatagtcaagtctggagtctattctttgtcaagttaggtatgtctaacatgcatccgcagaggttaccttgtccaactgatgcttgaagaaattctattctgataattttgatggcattctaaattctgcaatatacatttatgaccataaagttcactgattgtaattgtgttttcccctaggaataaaagctgtagcttcatcctgttccgacctacatgaaatttctttgaaaggatgctgcaatgtcactgatgaaggagtccttgctcttgcactcaattgccagctgctaaagatcattgacctgggtggctgcttaagtattactgataagtccttacaggcattaggaaaaaactgcccgtttttgcagtgtgttgatttttcaactactcaggtaaatgagtcataaacttgatgcaaattatgtgctgcctcaattgtcatccatgactaatcagaatatcacagttggttcttttgttattattgaaattgttgaccatttcttggtataggtggtatgagaatgatttttctggaatgcctcgtgtagcttgccttcagaaatagaacatttgcccaaccttgtaaccagcttcatcatatactttgagatcatttaaagctatacactgtgtattcagcttgtttaactataacttacctttaagaaaaacaacatgatcttcctatactttgtattccccatgtaaatcaaactctaaaagctaaggtgaacacatagctttgatctcaacctacattccttatttcttactcataactactctacgccatgacttggaataaggtatacatcccccctgtaatccttccatgtcactaactcaaaacaatgtgtgaatgtgtataaagtatgataacatgttttgtggtttttcttgctgttctaggactatggggtcagagaaattacttcttcccatgtgaaactcctgtaaaagatcaaacaaaactcactcctatatcatggtcgatgtgcttttcagtaaacagaaagtgtggtcctctgttatgaaacatcaagctcacttggttaaacaactccaggagtcaatttctttcatgctacactgccacagggtggttaataattgtactagaatttacatatttctattcactattttaagtaacaaagatggaatatatgactacaatgcacgtttgctgaatgggaggcaatcattcttcatggttaatgcactttagaagttctcttgtctccatcacaagtatttattttctcttttgctcaggtgtctgacagtggtgtggttgcacttgttagtggaccatgtgccaaacaattagaggtaatttttaaatgtctatgaaaatattaaactttattttatcctcaagaaaaaaatcatgattattgggaaggcagggtactttgtacatttggttctctccttccacctttacattagttctgaagaattcagttcttcaggttcaagtggcaggcctctgtctgttgagacatcttttccctctggcccttttatcttttagaggttttttatttgtttgtttgaatttttgtttttgctttatattttgagcccagactggcctagaatttgcagcagtctcaatctccccatagttagaatcacagtgattgtgattccatacccagattttcatactattttttttcctttttaaaaaaatatttgtgttctggggctggagagatggctcagtggctaggagcattggttgctcttccagagaacccaggttcaattcccagcacctacatggcagctcacatcgtctgtaattcaagttccagtggatcaaactttgcacagacatacagcgggccaaacaccaaatgtacattttttttaatgtgtttgttgtggctcatgtgttttaatcccagcactgggaggcagaggcaggcagatctctgtgagttcagggccggcccggtctatacaataaattctaggccagccagagttacctgatgagatcctgtaaaacaacaaacaaacttatttttatttaatgcaattgggtgttttgcctgcatatgtatctgcactacatgcatgactgatgcgtgaggaagccagaagaggatatcagatcacttggaactagagttaaagagagttataagcagttattttagtttatatttatcataaacataagttattttggttaatacatttggatcatggtcagagtcctgaatgtgttgccaaggcaaacatggctattggtggggtaaggggctgagaagtatctatgcagacacaaagtggactcaggaaaagatggagttagttaccttagttctttatataaatttttttccaaacttttttgtgctgttattatagatctagtttaaatttttttatttcattttgttttctacataggagattaacatgggatattgtataaatctaactgataaggctgtagaagctgttctgactgcctgtcctcagatatgtatacttctttttcacggctgtcccctaataacaggtcagtgtgacaggttacttgtatttaaatcttgacttcatcttttaccaacttgcatatacaacatattataaaatttatctctgctaattttaccttaaatattgttctggataccatccggaaataatcaaactggtatttcctcttctatttttaatagaaaccaaatcaggaaaaaaatttacacagtcaatagaaaaatgattcttagacaaaagcttaatatttatttatttatatgtatatgtgttcacatgccatggtaggcatgtaaagtcggaaggtaacttgctggagtcagttctctctttctaccataggagttttgggatcaaactctgcctgtctcagtgacaagcaaatttactcactcatggaaccatctcactggccccaaacagcttaaataaataccatagaaagtagagaagtatccaattatgtgacaacctttgtgtaattaaaattttgtttaatgctttaaaaatgaaataaataccataacacttaaggataatgaaatttttaaaaaatatactacccaagggatatgggaggtggtgtgcatatggaggcaaaaaaaaaggaactaccccccccaaaaaatgagtttagaggcaaaaaagtaccagcccccattttgtgaagctgtggaagttaagcctggattacattggagatgccagagcccaagacatctgcaaaggagagctgcagacagggagtgaaccagccctaaagagaactaagttctaggcagcaatgctagagaaatggagccatctaagccctgacatctgtcatggagctacaacatttggagtgtgtccctatttagtctcgtatttcctcactatgcccccattcctcccttgttagaatggtaagtatattctgtgccactataagttggaagtatataataagcttttttattttacaaggcttacaattaagagagtgcactgggtgtacacacctttaattctgaaacttcagggacagaagcaggcagtttgaatttaagggcagcctggtctctataggaagttcaaagactgccagggctatgtagagaggccctgaagggggtagggtggggggattgctttgaatcttccaattgactctgaactttgaacttttaaaaagtgttgagactgaaaaactgtgaagacttttgaagttggaccaaatgcattttgcattatgatatggacacaagcctttgggggccagggtttgaatgagactgatactcatatgttcatgttcatgtttgatgtttgaagacgtgatctccagttggtgaaactgtttgggaatgactaggaggtgtggccttcttggaggaggtgtgtcactaagggcaggctttgagggtttttgttttttcaagacagggtttctctgtgtaacagctctggctgtcctggaacttgctttgtagaccaggctggcctcaaactcagatctgtctgcctctgccaagtgccaggactaaagatgtgcaccacctccacccagttagacttttgagtttaaaagacacaattcacaggttttctctgtcttcctacttatgggtcaataagtgagctctcagccgttcatgctaccattcttttgctcatggatagatagactctaaccctctgaacccataagcacaattaaacactttcttttataagttgccttggtcagggtatttcatcacaccaatagaaacattagctattacacatcaataaaggacaaaaatcatccaaacagaacaaccacttgagaaaaatctagcacacacatactccatatcctgataagaggcatctgttaaaagcccagttaacagcttcacctacagagaaactcaatctcaaagaccaaaaaaataaacaaaaaataatcaaaaaacaaacaaaattccccagttaacactgtgatggacccgtagaaactgttattgccgaaaagcactgactcctccgttgggcctgtacttatgaaaagcagaataaactctggatctcagccttcattttacatttgtacattttacattcctttacttcgggttcatcacctgtttaatgcggcagagttaagtgtttgaacgcctacctgaaatctgaggtcctctgtggtggtttgaaagaaaatggccccaaaagggatcggcactattagaaggtgtggtcttgttagaggaagtgtatcactgtggaggcagtctcatatatgctcaagatactgagcagtctctcagaccactttctgtcacctgtgagtcaagatgtaagaatgctccagcttcctctctagcaccatgtctgtctgcatgccgccttgcttcctgccctgataatggactaaacctctgaaacagaaagcaggccaccacaattaaatgttttccttcataagagttgctgtggcccttcatagcaatagaaaccctaactaagaccctaacagaggtgagagtaactgagacaccatctgtcagcttgtatcatattctattttgttcttcacctgaaagttgccaattattgtcccaaacctccagtcatcttggattccaggaacagatctctaaagttgaaagaattctcagtgaattctccttagagcctccaaaaagaagttcagacaggccaaaccccaattttagtccaatcagatccattttagtattctgccctttaaaactgtacagtaataaattggtactgttttaaaccactgaattaggtgcttgttacagcagcattggaaaactaatacaaggtaaatacattgagtttcccatgttaaaacccaagcaatcgtaataccattttgcagttgctattgcaggttttgttaaggatttttgaacctatattcataagaggtcttgatttgtttttgttttttttttttctttcttcttaacttccttccttttgtggtatctttgactatatttgatgtcaagacagtagtggccttcaacagaatgaactgagaagtgcttcccttccttctacagagtctctccagctttgaacagaagttctcagtgtgttgtatctttgtccatttcattacttttaacatgtgattttgtttattggggtgctggagttatacccaggaccttgcacatgcttagcaagcactgtgccactaacttacacccctaatctgactgtattttttttctttttaatttacttttaaaaaaaatgttgtatgttcctatgtgtgaggtgtgtgtgtgtgtgtgtgtgtgtgtgtgtgtgtgtgtgtgtgtgtnnnnnnnnnnnnnnnnnnnnngtggggagatatgtagatgcttgtgtgcctatgaaagccagagataaccttacttgtccttcaggagtcatccactgagacccataccagcactagaattacaagtgtgcaatatcttatttttctgtttttcctttttttttttttttttttttttttttttttttttttgagtcagggtctctcaatgtgtagatcagcagagctacatggaaagagcctatctcaaaagaaaaaagtaactacatttttgggtgtgctaaatctaatgatagtgaagagtaacattaattattaatgacttattcagttgtatactgtgctttggattttaaaagtacacttatttaccagggctggcaatctagctcaggtcttccagaggacccaggttcaattaccaatacctccatgatgtctgtaactccagttccagggaatctgatattctcttctggcctctatgagcaccaggcacacaagtgataagcacataaaatttaaaagtaaatcaacattgtttttcaaaacagagtttttctgtgtagccctagctttcctgaaattcgttctgtagaccaggctggccttgaactcatggagatgcacctgcctctgcctctcaagtgctgggattaaaggcgcacaccaccatgtccagcaaaataaataattttttaatgtgctttaaaaattacatttgtttgtgtgtagaggggtgcatgtgtcatctagtgtgtgtgtagagatcagactattcattcaccagccccattgtgttttatatttcatgtttttaatccttccaataagcatgtaatagctgtcatcacacctagattttattttttgtttatgctaagacagcatcttatgaactggatctgccttaaattcctgactctcctacctatacttcccaagtactaatattaaaggcatgcattatcacacccatcttacatccagtttatatatgaaacattaaatatcttttattattataaattaatatattgttgttctcttttatagatcattctcgagaagtcttggagcaattagtaggatcaagaaaacttaaacaagtgacttggtctgtttattgatctttactgaggctgatctcaagaacctgtccaggatatgctctataaataacttgtttttcacttaacactaatttattattttgtcttagttaagctgtaactcccagagaatcagttcaatcttattttaaatgtttgtgcttttaagttaaccagcctcagcattttggcacttctattatcccctgttggtttgatgagccatctatttattttaatggtgatcctggtatgtgtgaactgtacttgatggagaggaggctgggtttgtttctttaataacaaaagttcaaatgacttattttccctctatagtcctttctctggtgtaggtatttgagctgttgtaaaagacattgtgggtagaattctaaataaagatgcttttaaaagcgtaattactttctgagttgacttctggcttttacctacatgaaatgttcatccaaaagcaatgtggaacatatggcctgttacctcttcacagaaagagatatacttgtttcactgaaatcagtagtaataatttgcccattaaaatgagacattcagctgcaaaagtggctcagtggtatagcacttgcctcactttagtgatgctagggttggattctcaacaccaaaaaaattaaaatttacaaaaagaggggtgggcagccattcaacatattcgaagtactgaggcttttactcactcatttcattgatcctttccctgctcagttctagggcttgatctcagggcctcatatataccaggcagacatgctaccactgagctatatcccaaggcaatttcattgggttttatggctgctctttccaagtacattttgttcatctgtgagcttcttccttggcaaaactggattcatagtgtgtggtgttttactaggtattgaacatagggttccatgcatgctaggtaggtgctgtaccattagactatctccaattccagaagtgtgtaaaaattaaatatgaaatgctattatagagtttggtgtggtggttacacattctagctctcaggaggcagaggcagaagcaggcagatatctgtgcgtttgaggccagcgtgttctaggccagctagagctacaaagtaagaacctgtctcaaaaaaaaaaaaaggaaaaaggatcattatagagattaagtttactgaagctctactatttcacagcaagttcattcctagcagtcaataaccagatcatccttttgtttataaccagttacagtagtaatctgtaataactgcccaagacttgtattgaaagctagtcccccatgcagtaatgtccataagtggatcacgagatctctgacctcactaatgggttagttcattaatggattcataactgaatggacttttgggaagatggggttcatgagaacagctgtgagccaatttttcatacctcttttatagggcaaaactgcagggtggggattttgcaagcaagcacagttacagaagcaagacgaggcaattaaggaaatcttcctagaacactgttgttcctagaacattctgtggttatgctgggagggggcagcccaagtctgataaacacaaacttaagttttacagtagacagaattggtttcctgattacaaaatggagttgggctgatttcctcatcgatgggaaacctaggaggtgggactttgttggaagaaaaagtcagtccagttaggtccttggagggtttatgttattcctggtcccttgctctctctgcttcctggccaccataatgtgagaagccacttctactgcacactgttattaccacaatatcccacattgcctccacacaaaacaacagacccaacagagcaaggatcaaagcctcagaaactgagccaaaataaaccacccatttaagttgattttatcagctattttgttacagtaacagaaaggtaacaccccagttccttatctttccagagatattttattaatactgcagcaaattgtatatattatatccatacatatagatatactttctacataaccagttgtatatgatacatattattcacatttttgtttagagtacagtgttttgctgttataaaatcctgataacctagtatatgaaatgggaacaaaccattactaactttagtaagccatatagagtcatccaaggtgttaaagcaaaggaagaaggaattttttctctctctctctctttttttttgagacagggtctcactgcatagctctggctgtcctagaactcactgtacaccagggcggcctcaaactcccagagatccacctgcctctgcctcccaagtactgggattaaaagtatgcaccactatgcaggactgtacagagaaaatttcaaataactttctccatgagatagggtctcactatgtagttctggctgtccaggaactaactgtagacccgtctggcttcagactcacagagatcagcctacctcagcctcccaagtggtagtattcaagcctcaagtcaccacaccccaatgaattgcattccttaaactgtacctccagcagaggaaataagagttcaatacaaacagaactgaacttgaaagcactctgacaaatcagggatgaaaatcccacactgcgcttgtggtcagtccactattatcctgctgagttggctctggaagagtgtattcttctaatttgtgtagctgatgccgaatactgtgtccactgaactggggcctcccagggtcaccaatcaatactcgggttctgtaggtccaaaagtagttctccagccacagatgcagactgtctgcaaggtcttcatcataaaacatatctccaagaacaatgagatcaaacttaccttgtttggtactcaaaatgtttttggttaaaacaggaaaaggattcagtccatttaatttgcaatttagtgtaatcgccattcctgcaacttacaaaacatgataaatcagtctacaagaattatatcagtaggctatttttaatttcttattaaggtgtttaaaaacaccttttttcccacatgaactctatatttcattttctctttcagcccaagctttctcaaaacataagtatttatcaacaatgattaatatgaattctacataaggagttctttaacatataaacaattttattctctttgagtaagatgaaaaatttaacagacaatatgcctctttctctactcctcagaaaatagtatttagaattttttccaatttagtaattgttaatgtattattaaaaattcacaaaaacatcctgtaactccatgacatataagccttgtgtatatagtctgtatcatttgctatttagacctcttaaccaagatcttaatactgatgaggaagtaatttgtcacctttttgggaaagagaatgcctgtcatatcatgcatttaaaccttgcataaatatttgtcttcctagaaactgccatttttacaaattgcaaaagtcagtgggggatagtctgagtttctgtggttaaacaccttttttaatctaatagaggccagtgagatggctttgcaggttaagatgcttgacactaaatctaacaggagttcaacacctgaaggccaggcgtggtggcacacaacttcaatccaagcactcaggagacagtgacaggcagatctctgtgaatttgaggctagcctggtctatatagagagttctaggacagacagctaggactacacagaaagaacctgtctcaacaaaccaaacaacaaacaaagagtttaatgcctaaaacacacatggtaggaagaggaaaccagatcgcacaagctgtcccatctccccatgggatgtgcactatggcacacacacacacacacacacagatgaataaataattgtaaaaaaataacctaattaatacttatctcctttgttaaaagggattttgttgttgaatttaatttaactttatttgcaatggtgttttatctgcattaacgtctgtgtgagggtatcggatcccctggaactgtagttacagaaagtagtgagctgccacattggtgctgggaattgaacctgggtcctcaggaatagcagcctgtgctcttcaccactaaaccacttctccagcccctgttgttttttttttttttttaggcaaagaagttcaaagtttatgtcagtacaaactatatactggctgggcatgatgatacatacctgtcgctccaagactagatagtatacaacaggaagattcctgcaagtattagccaacctggggtacaaagagaaataccaggccatgtaggtctacagcctaagaccctgtctcaaaaaacaaaacaaagaggcttggcatggtgttgcatgcctataatcccagcacttgggagatggaaataggaagaaatccaaggtcatccttagcttcatagctagctgaggccatcctgggctatgtaaaactctgtctcaaaaaaaaagaaaaaagaaaagaaaagaaagaaggagggaggaaggaaaaaaggagggaaagggggagagggaggggagaagagagggaaggaagaggaattggtctaggagagaacaggttatccctactccatacccttctcccagaactacaccctgcttgacagaacagtttctcccttctcagaaacgatgcttgtaaaatgtttaacagactagtgttcctccttccttggtgggaaatgatccctcgtttaaagtaaaaactgcactagcatgcacctgatatgatttaattgtggtcttttatctttataaattctgtggtgtttaatctaggggctgagagttcactgtgacaaaagccttctctcaatctctagcttaaataaagcactcttatttggccttatagtcatggtggtctataaccaaagaaggacctttttaaaaagctatattgaatatagaagagcaacagtgggatttttaggaccattttctgggtctttttgtatgtttgtttactgcagacagaaaaacaattgttgggcttgattaagttacaagtgaaacctcttaataaaataagacccctggagggccctaccctaaatgaaggtaggatcagaaaaaaaaatcagatgaactctgtagtctacttgactcagcctcctggggtgctggaattaaaggtatgggctgcctgccatacccaatacaacttgggtcttttttttttttttaagatttatttatttattatatatacagtattctgcctgcatgcatgcctgcaggccagaagagggcacaatatctcattacagatggttgtgagctaccatgtggttgctgggaattgaactcaggtcctctggaagagcagtcagtgctcttaacctctgagccatctctccagcccccacaatttgggtcttaatgcagtaaaaatatccactaaagacacaaagttatctctacttggactttgtgtcatataaacattactgacacattccagggaattctcaacccagaagctaacatgcatgccccaagtttgtatccctctggaatatctgacaaataaatccaatcctcttgggggaatgcactgtcagttcaggccccagataatgtcccactgaacacacctcgaagtatcagattacaaaacaaggcaatcagtgatcacaatgtatcctgaaagggggacagtgagctttaaatgttttaaaatatgcagtccttactggggtctatgtcattggccaagatctttgatgcaccactcatcttagcagcaattgctgttgctccacatccgctcccaagatccaagacagactttcctctaacaacatcagggttatccaaaagatacctaaattagaaagaaaacagaaaatacctgagtatgggaaaagacagtaagaaaaataaataaataaataaataaaaaataaaccaaaacaagcaagatggttcagcagataaaggtgcttgctgccaagtctgatgacccaagttcaacatagtggaaggaaagaattaatacataaaagctgtcctctgaccttcacatgcacaccatggcatacctgtgctacatacacaaacacacaaagcaattaatggtaatttttcccccatggtatagaacctacctgacctagaccatcggtaacatactactcctggggaacaggaataccttttgtttgacaactatatacccttaagacataaccagatgaactcatgaacaacactagagcaaagagtagatggacatgctaaaagtacttaccctatgccaggcagtggtggtgcacacctttaaccccagcactcaggaggcagagggaggtagattcttgagttcaaggccagcctggtctacagagctagtcccagggcagccagggatatacaaagaaaccctgtcttgaaaaacaaaaatcaataaaaaagtatttgcttttgttttagctactatttcttaacaaaaagaatagttgcagctatatgaaaaaaacaagatggacaggaaggagcttaaaaatgcataatcatggcactggagaaatggatcagaggttaagagcactggctacactcccagatgtcctgagttcaattctcagcaaccacatggtggctcacaaccatctgtagtgagattggatgctctcttctagtgtgcaagcatacatgcagatagagcactcacataattaaataaataaataaatcttaaaaaaaattttaaatgcagattcaagtcaaatgcagggtccacctaagatgtcctggaactgccacaaaacagaaaatcccaaatgaccactcatacttcctgtgtgctgaaaaggcagtcctaggagagggtggaatttacagtattagaagcaagatcattggagggttgggtctttaagatccatctaggaactctgtactgactgttgatttgcccatgaacttgaacacaaagtaagacatatggatcttttatgaccatgtaggttctttagcagttgacattagagtttcttgtggggtagaagctttatttatggatattcattaaaaatcttgtgtaaggtggtgaaactatgcaatgaaacaccaaaggtaggatcaaactactatcaaaacaagactttggggataaggagtgatgttacaaaagttagtatgagggctggaaagttggctcagcggttaagagcacttgctgctcttgtagaagatccaggatcaagtcctggaactcacatgacagctcacagctgtaactccagttccagaggatctgatgacttcttccagtcttcacgggcaccaggcacatatgaggtatacaaacatacattcaggcaaaacactcatacacaaaatagataaatccaaaagaaagtttcaaagaaaaagttgcttagtggcacatgcctttaatcccaacactagaaggcagaggcaggtggatctcttagatccaggtcagcctggtctacagagtgagttccaggacagacagagctacaatagggagtccctgacaagaaacttttaagggaggatgtgtttactttgaaggaacaatttggagatataaactaatctatcacggaatgtctggcagtagggggctgtggcagtagacatatgagattgtttgctcacatcagtaaaaattatgaagaaaagaattctaggactcagctagctttcttcttttttgtcatccacattcaaggtgggccttccctcagttaagcttaactggaaatgtcctatcttggctagcgtttggtttttttgtttagttttgtttttgtagacttgacaaatgcctccaccagactggcctgttagcaagcctatgggacattttcttgtttaatgatttgctggagtcaactaacaccagggtccaggtcccaaagaggaggtatggagtcagtgaggtaaaggaggagacaggatctgagggtgaatctgttatggctgctactttactgtagctgcacagaagattaaatgggaggaggagggcatgtgagcttggctgtggcttgctcacatcagggactaaggaagttagaattggccttaacgagttaatagtcaccacagtcatatgttaatgaaagggccacaagttcctcttgccagagataaaaatgactcactttttaacaagaagggactttcttcaggcccctgagggaataggggctgtcttaagagtttttattgctgtgaagaaacaccatagctgtgggggactaaagtatttccgctatagaatattttgagatccagcctttggtctcactaaacatggagcaccgaaagctccggcccactattgtattgttaatgccagtagggctactattgtttagcgtggcctcaaggtaatgtgcctcttatttgcatctctgtgggcctaagcatctgaacaggccctcacctggatggaggggctagaggtatatgagtaacttgtgaggatggaaggttaagagttaggggcgagtggccagagcagagaggggacaaagagagaaatggttccctcgtggtattggcaggatggttaagaaacaccagaaaagatggctaataaagaaatgactctagttccacaacacggaactgagagctctctgaagatgacaagatgcctgtgtttgatctttatcgccattgggttgctgggagcttccaggttgggcgcttccaggtccacacacccccactcaggcggaacctcatggctgtcgtgggttaaagctgaggcaagccgggtcacgacacatagccatggcaacccttataaggaagacatctaattggggtggcttgcttatagttcagaggttcagtccattatcatcatggtgggaagcacagcagcatgcaggcagacatggtggtggagaggtagttgagatttcctacatatcacaggcaacaggaagtcaactgagcataggaaacctcaaacaccaccccccacggtgacacacttcctccaacaaagccacactcactccaacaaagccacacctcctaataatgccactccctataagatgggggccaattacattcaaactaccacattcaaactaccacattctactccctggcccctgtaagcgtgtagccattatcaggatgcaaaatgcatttagtccaactccaaaagtccccttggtctatcacagtctcaacagtctcttctgaaaatcatgccatctcttatctgtaatcacctataaaagtcaaaataaagcagatcacatactgggatgaagaccccaggcccttgcccagacccctgccttggtcatccctagacatgacaggctgcagaaaatacaaagcaggatacagcaggatgtgctgtacacctgacattgtacagtgccccctgaccttgtcctcattgctaaaaagaaaccgaaatatcccatatatggtaaggaaccaattaggagctaacagactctgaatgtgcttccccataaaagtggaatgtagtaaccacaacaatcacccaagagatagcaatctccctgcagctacaactaaccaattaaccacagtcaggtgtccccagctcagaggtataccaatcctcttagtctgttcctaggcagtctatatcccctaacccccccttgctttaccctcaatatataccctaccccactgctactctgggtctctcctactccaccactgtgacggacagacacgtgaccaggtgccaactcacaattaaaattctttgcttttggatcagatttggtctctaggtggtctttggggtccagatctgggcataagaaggatatacattaccattctgaaattaaggaagggcgaatagtggggaaataccagaccaaagcaaggccaaaacccagctgggtaaactccaaattctgcatttccatgtctgatgacaaatcactcttcaggtccccaaatcctttcagctactttttttctcttgggctggttccactcctttagcagctctcctcagcagatatcccatggatgtggcatctccaatattttggttctctaaaacagtcagacttcaccttcacagcttcacacaatggcctctctaggcctctattcagtgacacctctgacacatgcctggactcagagactttccttagtctcagggacaaattccatagcccctttattctatccctaactccagaagctgccaagttctgccgcttactggggctggacatggcctctttgttagttacatcttcatcaattttctgtccttcactgcctaagcttggctgtcctgaaactggatctctagaccagacctcaaactcacgagatctgcaggcctcagtctcctaagtactgagattaaaggtgtgcaccaccacacttggctctcagcttctctttaatgcctttgcacaggttggaagatgagatgggcggggtcttgccctgaggtcactactccctttattttatgtaatatcccgctcttctctaatctgctgatctccctgaatataggatttagctctattccacttcctggtgccccttttctccttgaactgtacattttgtatttctccttgctcagcttgctccttttcattataaatcttcatcagagttaacactaataaccatacaacagacaactaggctgttttgagattccctctaccaaaagaattaatccaaaactcttcactttagcctcaggcagactcttcagacaaggacaaaaagcagccacattcttcaccaaaatatcacacggacaaattctaggaaacgtactaaaatgcttctaggaaatatcttgatctagccatggacaatttaaatcattatcagcaccattgtcttccatgctccatgcttaaagcattcctaacccaaacgaccaaagtccaaatccccacaaacaaaccatggtcaggcctatcacaacaatacttcagtccctggtaccaacttctgtcttagttaaggtttctattgctgtgaagagacaccatgaccatggcaactcttataaaggataacatttaattgaagtagcagcttccagttcagagattcagtccatcatcatttgtggggagcatggtggtgtgcaggcaacatggtgttggctacatcttaaacagaaggcaacaggaagtagactctgacactgagcaaagcttaagcaaatgaaacctcaaagccggtccccacagagacatacctccttcaacaaggccatacccctccaacaaagccacacccactaacagtgccactccctatgagattatgggggccaattacattccaactaccacaaggtcttttgtctaaatgcctgaccttgggaaaaggactttcttgggggactagacactccattacagattacagttttttatatagcttttatagttacagaatattggatatatagttttatatatccaaataggtaaagcttaaagtaagcaaagacaaagctagacaaatattactgtgaaccttaggaatttatatatcttatcaaatatactttatttatcaagcatattatctaaattttctagcagcttagtattaacttgtgtgggagtaggcagaattatcacactatatggttccacagtggcagagattttttttccaaagaatcattttgtttaaagaggctgtcattttatgcattttcatccttcaaagcccatacaaaatttcccaaagggaaaggcagaagggaactctcataacacatagtgagaatcattaaaaatgaaagtgaaagggtgctggagaattgtgatccacaaagtcgaaatgctggaactttgtcaaagcagcaatgatccttgtggttcacaccaatgattgatgtgggagggcccagctcactggggcaatgcactgagcaggtgatcccgtatggtattagaaagcaagctgagcaagccatgaagagcaagccagtaagcagggatcctgcatggcctcggcttcaattcctgcctccaagtcttgagttcctgccctgattttccagatgaatgggacatgacctgaaagtataaaatgaaataaaccctttcttccccaagttgcttttggttgtgcttttttttttttttttattacagcaatggaaactctaacaaaagcataccctcataatcatgcccagaggtgtgtcttgtaggtaattccaagttcaactgagttgacaacaaaggttacccatgacaggtgtgaagagaacaactttgttnnnnnnnnnnnncccccaacccccaaccccacccatggcaactgtgaaaatcaagaatgtaaatacacagagactaaattttttaaagaaaccattggtatatatcacagggcagcttcaaactcctaaccctcctggatcagcttccaaatgctagaagtacaagtgaagggaccagcgctgctccccacttttggcagccatgacaagctaacgcatgcttgcctgaccttgctgggaatgccttggtcactaggaggccagatgcctcgtggcaaggaatcaatcagaagttagctaacaggaccacgctttattgctctgaatgtgctttacggacaagtgcacaacaatgacatgcagagcatagcaaccgccctgggaagacctatgggccataacaaccaattgaccaatcaacacagggcaagctgtccaagcctggaagcacagcaatcctgagactgtgcgtacctctagacactcccctaacactgcccttttaagatccctgcctcatggtttctaggggtcttttctctaaccatctgctgcagaggatagatgaaaggcccgagctaatggggttagctgtttaaacaactgcaataaaagactgcttttgcattgaaatgggcctcttggtgatttttgggttcagaatttgggcacaacacaaggatgtacacatcatcacgaataactacataggaggcctttttggagatgactatatcttcccataggacaaatcctcttctacgagaggattctacaaatacaaatcttctacaaatcctttacgagaaggaaagcaacccataccatatacaagttggaacatgtgagccccagtgacttccttgttttgctgttatgctaagggaccagaaagaagggaatggaggtgggggtgggtgctgagagaatgactcttcaatagccatcagccgtaaagattcacatttcagtgagacatacctagacagggcctggccacctggccagtagattgcccagtagggatcactgtagggccacagctcagccctttcccaccagaacttgcacctgggggtcaaaagccgtaactggatttcaggggtaaggctaccactgctggtgacttcagtattctcctccaggtaggctttcatctcagggtccaaacagctccctgctgtcctccaggaaatcagagggaacccactgctcacagcctgcaggaaactccaatggctccttgaagttttccaacccagtctgaaagccattagtacttctccaaatctcaggctgtcagtgttgccattaaaaggattgttccccaagcagatacaatgagggtctgcctctccacttagttgacactggaattttggatctctacaacaaacaaacaaacaatactgaaaattcttagtccatatccttcaacataacaagaaaataagcaagtgtatgttctaacaactcacaagtacaagttcatttcagaggacagctttggcttatcaatttgggtaaagaaatccagttgctttttttttactgtgtaatccttttagtaattcactatgacaaaaatacacagacattttattttacaacaatcttcaagaaaatgaaataaagtatacctttttggcttttttttttttttaggatagacttgtgtggtgatatattgtttatgatttattaaagccactggagatcaaaatagcaaagcagccacactctttacctatagaagctaggcagtggtggtacacacctttaatcccaggactcagaattaagaggtagacagatatctgttagttcaagatcacactgaactacacgaaattaacccagtcctaaaagatacagctcacacaaaggtgatctcagcacctgggatcacacgtctttaatcccagcacaatgggtggagacaggagtgatatgactgggcagagaaaggaatataaggaagaggagagagaaattgagagccttttgcctctgagggtttgtggagacaggattgccatttcagctgggtaaaggttaagatctactggcttggctgctttgcttctctgattttcagcttgaagctttaactccaatgtctgtctctggatcttttatttttccttgctttggggctaaagagatagctaaccagttagagcacctgatgctcttgcagaggacccaggttcagttcttagcacccacatagcatatcacaaacataactccagttccaagggatctggtgccctctcctggctttgttgggcaccagacacagacagtcaagtacacaggcagacagacaagcaggcaggcaggcaggcaggcagacagacagacagacagacagacagacagacacacacacacacacacacacacacacaaggcacatgcacacccacatggtacatttatacatatgcaggcaaaacactcatacccatcaaatatagacctgtactgtagcctaggcggcattggaattcactatgtagaccaacctgacatcaagcttgcagttaccctcttgcttctgtctcttgaatgctgagactacaggcatacgccatcatacccagcatggatttcattgtaaaaggacaccagcttctaagttcccatcaatactgacttgactttaccaaacctaaacttaaaatatttataacccaaagtacaccttggtaaggaggaatgaggaatacctttttttgtttgtttgttttctggcacaaggtctattatgtagctctggctgtcctagaactcatgcattgaactcacagatatgtgccactatgcctgccttgttgctgttttaaagatttgctttatttatgcgtctgtgtgtatgtgactgtctgcaaaggccagaggcaccagctccccttataggcagttgtgagctgcaggacatgggtactgagaactgaccttggtcctctgcaagagcagcaagcgctcttaaccctgagctatctctccaactctttgttgttttcagatggtctcatggctcagattggcttccatctctctaagcagagaaggatggtcttgaatttctggttctccaacatcacaagtgttctggtgccactactccagagttacttgtgcttggggtcaaacacaaggcttcacgagtgctgggcaagcactctaccaattgacccttaacaccacagcattacggaattactctgtatttggacaacatgtcttcccagcactgacagtttgcttatgaagaagttataatcaaagtatgttataagaaagctagcaggctgggcatggtagtgcacaccttgcctttaatcccagaacttgggtggcagaggcaggcagatctccatgaaagaaagaagcagggatttaaaaaaaaaaaaaaaaaaaaaaaaaaaaaaaaaaaaaaaaaggggnnnnnnnnnnnnnnnnnnnnnnnnnnnnnnnnnnnnnnnnnnnnnnnnnnnnnnnnnnnnnnnnnnnnnnnnnnnnnnnnnnnnnnnnnnnnnnnnnnnnnnnnnnnnnnnnnnnnnnnnnnnnnnnnnnnnnnnnnnnnnnnnnnnnnnnnnnnnnnnnnnnnnnnnnnnnnnnnnnnnnnnnnnnnnnnnnnnnnnnnnnnnnnnnnnnnnnnnnnnnnnnnnnnnnnnnnnnnnnnnnnnnnnnnnnnnnnnnnnnnnnnnnnnnnnnnnnnnnnnnnnnnnnnnnnnnnnnnnnnnnnnnnnnnnnnnnnnnnnnnnnnnnnnnnnnnnnnnnnnnnnnnnnnnnnnnnnnnnnnnnnnnnnnnnnnnnnnnnnnnnnnnnnnnnnnnnnnnnnnnnnnnnnnnnnnnnnnnnnnnnnnnnnnnnnnnnnnnnnnnnnnnnnnnnnnnnnnnnnnnnnnnnnnnnnnnnnnnnnnnnnnnnnnnnnnnnnnnnnnnnnnnnnnnnnnnnnncaaaccgcctggagagacggtgtgggcagtaagagagcttgcttctcttcttcaggaccagggtttggttcccagtgccaatgtcccgaagtgtgtacttgtaactttagcttctggtgacacacattcccgtctccacagacattcacatacacacacacattcacacactcacacagacacccaagcgcgcgcgcacgcacgcatacacagataagtaaacaaacaaataaataaaaaggttaaattccaaacagtgcttgtgagctcgttactttcctcagaaaaaaagaaaaaagaaaaagaaagaaaaaaaaaggacaggactatacttttaaaaggggtagtgcggttcttgtggccttacctgattttgctggagtctctcgcgcaaacgaaaaaaaaagaaaaaaatgtacacagagtttcctttctcgggagaggaagacagctggaaaaacacagagccgccgccggaacttnnnnnnnnnnnnncccccccccgccgccaggacacaccagctccgcctttcttcctagctgtgctttgttctggggctcgctggctacccaaggcagctgggaaagtgaaagcccttctgtaaccttgagactttaagaatggggaaagtggccccaggtcagtccctgtagacctggagcgcaactgcacagcttgtgtacgccgtgtctggcgaatcctgatttataaaacctcctgcagaattgtatgcagccccactgcgtgccaagcacttttaagagtaagtgcctggataggtgggtaaaccttttatgacacattcaattgctataaatcataatatgcggctccactattgtaaagtcacagcctaaggctatttttcagcctgtggggctcaggttctgaatctcttaaatccacctttctagtgagtttagatttcccactggcccctcaactcacgactccaaaattaacccatctcactttcattaatgaaaatatgctatgatgtacaagaaagaaaaaataccccaaactaaaaaaaaaaaaaaaaaaaaaaaaggattaaaaaaaaatctgggacaggcgttggtggtggatctctgtgagtttgagaccagcctggtctacaagagctagttccaggatagcctccaaagccacagagaaaccctgtcttgaaaataaataaataaaaagaatctgagtggtgatggtacttgcctttaattccagcactcaggggtcaaaggcagatagatctctgtgagttcaaggcctgcctggtctatagagtgagttacaggacagccaggactacacagagaaaccctgtcttgtaaaaattaattaattaattaattaaaataaaataaaaaattttaaaagtctgtatttgtggcttgccctcttgtctaagcatgcttgtctaactgcttgctaagcatgcagttgtactgttatggggtcttttgcttggatctcaaatagctcaaacaacaagtcaatgaaaaaaaggttattataatcaattctgctaactgatcaataaggaacacagaacagaacagacttgggagccaaactgtcacccgaaaccagaatactacagagattttaacacaaaaaccacaaataaggttttcaccaattaggattcagggattggggactttcctagggacattactttatggttcacttctgttctcactggttggtttgttcacctatggctatgtggcttaacccacatttatgtctcaacttaccaaacaggttgtcagttacccagggaggtcttgggaatttaaactttatttgacccctactcaaaatggaagttttactttaaatggcttacattgcccccttgtctttacattattcaaatctttgattatctgttttagagtataagggattgtattgggttcttaggaccatgagcttaacttagttaactctagacagaacaaatttaactaagacattgaggatacaacgccctatgagaagcagaagagaaggaggaccagtggtcttgctaaggtggtgagcaaggtggttggccaaggggaacaatcaaagagattctggaaccagttactggactgtctcctttgttcctccctattcatcagttttgttttacttttgctacggtgtcttggacgagcccagaatgcttggcataaaaacaacaagtttcccacaatgccatacagagacctctgtccttaagaaacgatagatccagtcctcttctgttttgtagggctacttctgccagggagtctgtttttctaactgtcacatggagaagtaaaggtggcttaggtctctgtctgcctgctggcttaggagttggaggtttttgttttggtttgctttggttttttccaaccaccaggaaggctattcccaaaactgttgagccagcaatgccagttcctacaagcaaaggtaggagctgaatgagatgggctcttcagaaatgagtggctccaatgaggattatatcagctcaacctgctggaccattgaagtatagaacctgagggatgatgtaaacaagaatacggagttcagatttgtctgagaaatgggttagagctacacagtgggtaataccagacatgcagacaaaacaaatgataggtgaactcatgagaatgctagccagtttccttcaggctccatcttttgccatggatggagtatgtatagttatcattacaatatgtcccataatgagatttggtcaaagaaaaagctgtcaatctcaagcaagttcctatgccctggatatcccctaatgtaatagacacatgaatagaccaaaggcatttatcatctgcctggcctaaggttatcgtggtgatagatgagtctttccctggtgtgggtatacttgcaatccctacattgtggtgatattattcatgatttattaaagctagcctgaggattcagaaagtgaaatcagccagaagccatagaagccaggcacacatctttcatcccagcagccaaaagctaggaggtgatggtaaacacctttaatcctagaactcaggattaagagatagatggatctctgtgagtccaaggccacacaggatacaagagattgaatcagtctaaaagaaaaaggaatcacatgcctttaatcccagcactagaggggtataaaagatagaagcagagtatgagttattcattctccacccacactgaagatagcagcattcattctccagccaaactgaggagaggcagcaatttgagacttggtgaagagctcatgcattgatcagccctttcagcctaagatagaagtgagagctagtgaccagctgctttgcttccctgaccttcagcttgaaccccaaaatctgtctcttggtcatttattaattcatgttatataacataataaaggagcctagggtctaaacacagtcaatactaccagagctaaacctttagtccaagactttctgctttccttttaatggttttccaactatctataactaggagcctccaggaagaataacaccattataccaagtaacagccccaaatatattatcatttgcctcagatgaatggtatgtttattcctactaataggacccacaccctaaaattccagaatagtcttagataccttctatagtaaccaatatgctttaatggcctatattaattatttatgagtagttggtatgtatatgacatatacatgtgtatgctggtatacttgtcaaagattgtagagtccaggggttgtcagactcaatcagttgtcttctttaatcccttctataacttattgtttcagattgttttttttttctatgaacttggagctccctgctgcagctagactgctggccagcaagccctagaatccacctctcttctcctgctcccctcttctgcccttccccttcataactgaaattctagcacctggttatgtgtctgcgagaagggtagaaggaatgctggagtttgaggttagccagtctgaactatataatgattatcaggccagccaggactatgaagcaaggccctttagcagatacccctacctacctatccccatgcacagaagtctgaaagctggagctggggagtagtagagaacatgcctaccataagtaagaacctggttccattcatcctgaccaccatttaaaaaacaaacagccaggcagtggtggcgcactcctttaatcccaacactcgggaggcagaggcaggcagatctctgtgagttcgggaccagcctggtttacaagagcaagttccaggacagcctccaaagccacagagaaaccctgtctggaaaacaaaacaatacaaaacaaaacaaacttagcttcccctgattatatccaatagaaatatcatttagcaatgtcattgcatttcctctacacagccttcatgaaggcagaccatcttaagccttttctactttttggcacaatatagaaagtgctagaaattctattaagcaaaagttaagagcaggtatatgtatagttagccaacattaccaggctaattgctttcctgttcctgtgacaatatataatgaaaaacaacttatagaagaagattgtggggttttttattattatattttctggcttatggttcctgagccagaatggcaggggaggcatgatagaagatgtccagagcaaaaaggtgaatgatcacattttcaatagcaaggaaaaagtaaaaagagctaaatgtaagtgaggctaggatactgtcttagttggagttctgttgtgaagagatgctgtaaccatggcaactcttataaaaaggctgggcagtggtggcccatgcctttaatcccagcactgggaggcagagagagacagatctctgtgagttccagatcagcctggtctacaagagggagttccaggacaacctccaaagccccaaagaaaccctgtcttaaaaaaaaaaaaacaaacaaaaactatttaattgaggctggcttacaatttcagaagtttaatccattgtcttcatggcagctcatttattctgagccaaatgtgaaggaccatggaatgggttattctttgtgacacatttcaccatgaacatgattacatgaatgttcacagtcacagatcaagacgaagtaaagcattttccacatacattggtgggcatatcaggtagacagagttatagcaaagtgagaaatctgttctgtagtttcagatgctgtcttatatacatttttagcttttagggtggtggaagctaatgcactacaaagttcatacacattcattctgaaatcatatatagaccacactggcatactgatgtggattatccttatctccttcaaccagcaatgtctgattatgtttccatgcacttaccagatgtcttaattagggcttctattgctgcaatgaaacaccatgacctgtccaaaaaaaaaaaaaaaagttatttaaaaataaataaaaaagccgggagttggtggcgcaggcctttaatcccagcactcgggaggcagaggcaggcggatctctgtgagctcgaggccagcctggtctccagagcaagtgccaggataggctccaaagctacacagagaaaccctgtcttgaaaaacaaaacaaaaagaaaaaaataaataaagtaaaattaaaaaaaaaaagaatatgccttgagataaggatattgggggattgactataactcagtcaaggacttcagggataaggagaaaatttatctttacctgtcattcttgctgttaatctaggtgtccctgtgtctcttttgtccctcctgagacctctgctctgggacagagcatggcttgatgcttcagactatgaattctagtattaaaaggacagaccgtgacctaacagcacatgtctgcctgttacaccagcaaagtacactaaaaataggaacttttatcccttttattcagtttggggatgaataattcagtaaattggttctgaaggttacttgcctgagaaactcccatcatgtccttctgattcctttacctttcctctggagtcacctagattccatgattgataaacatctttataagctgggtctcaaactacccccaagtaacatgagcttgcagggcctgctatatccagatggggacaaatatccatgattgtgaggccttaccctagagcagaagcagtcatctgaggagaaccagactgttccctcaggagatgacagagataacttcctcaggaccaaatctgagacaataagtaacagaacacaccttcactggcaatgctgagtgtcttgaaagcgctgtttgacgaagttccagtgcttggacaactttgagtgacccctacacaacttttgcttgttctgcctcagaaacatggaactatcatggacaggaaaagattttgattatgaaactaatgacaagttgttgtgcccagactctgaactcccaaaaccaccaagagactagatctgatgcaattgaattccaacgtattgaattcaatacaagcctagacagggacctcatccaaaaacgccctaagactcaattgcagggggtttataaaggcaaagatcaaagaatagagttaggggtaccggttcaaagctgattggctgcagagtccagggttttatctcttgtaccatttgtgtccgtaaaagttgtttcagcttttcagattggttgctccctggggttagggccatttgtctccccttccagcctgttggggccattcgaaggtttcttcccttccagtttgttagcttttccagagggggtgggtatggtgtaagccatcttcacaggtcatggggtcaggttctcacatcctgccgtttttgaccctttttctttagaatggttctgggatggcccttcaaagcctggtgcccttctgaaggcaaagcaagctgtttaggaatcttaatgttcttctcccctttgcaggattgcaataaagagaggggtcctattgaaacaaaggtttatgacaaagtcacaaaaggaaatatggtggctcagtgacttttcatgtcaggacttttctgatattgtggaaaaaataaagagcagaggacaacacttcaaaaaccaaagggaaggatggtgggcttacatcagatataaaagaaaaagaaaacaaaattaaacaaggcactgagggattaagttcccaaagaaagatcagatattcattatagtagattaatcaaataatacaaggtaagtttgatataacaggtggtaggaaataacttctgatctgtttacttagtcaaacttagagacatcctgtctagaatgtctgtagctggaagggtttatggcactgattttaaggaaaaagacattgagttaaaagaattgattttatcagaatgttagattttaggtctcatgaaatttgctgtttactcattttgcttcttttactttgatacgtttatctaatcaaggaagactttagaaaaagtaatgtaccatgaaaaggctttgtaatcaatgattacagtctatgaggaactgattttgtgtgtataaataaagtctgtgagagttgcaggctgtcagagtaggtcagaccatactaagatgtgctccctctctatccttctcccataaaagaactaaaaatgtccacgtctgtggctgctcttggccactaagtctgagtattgggcaaaagcctggagatttggatgaaccacaagactcctggtccttttctgagagaatgtctcccacctttcttgtggagcagccttatatacaaacttacaaaaatcccaggtcaaagggttcacaacagaatattgatcccagtggggtgaggtcaggaaaacaagaggtacctgtggttatgctggaaaacaactcttagagaccccatgggggctgggttccaacatctcccccttctttatatataacaaaatagttatcaagtaagaactataagattttaaccattctatcttagtgtgttactataactatcttcaactccatcaaagaacatagaaggataatatataaactctagaactgacagagagacatcttgcttcctagacagtcaccgaaagtttcttggtaacgttggggcatccatcttttgcctacaggcaacaatgtatctggcagacttctcagcaaagcaggaaattctaaactgtccacctgcattggcagtttgtctgacatcttttttctgtgtctgtagaatgtctggcagactctttcatgaagcagggaattctaaactgtcctgcattgacagtttgtactccccatgaagcaggaaccctttaggcattttcctgtgggtcctgcatgtccagtttataaagcaacagttaaaagagtagcttcttgcccaaatggctggtcttgccatatcaaagtcaaactctataacaagtttcttggatgcccatcttcctctcagatgtaattggtgtgccaggagcagttgtgtctcactgtcaagaaaaaccctaaaccatttaaatgccatattttctgtaggtctttgaatggtatgaagaatatctatatatctagaaaacctaactggtatcaacaaatgaggatccattccaatacaaaatatcatttctatatcatattcctcttttttccttttaaaagtgattgactgtgaccactaccatttctaactgaccaaatttaaatgaaaaatattcagatcacctgggcctaataccataccagcccttcaccctccatggaaataaaagcagaaatttccctcccaagtaacctgtactttcccaagtaacctgtgctttaacaactgtttctccttccccagcaattaacgatttaaagacaacacaatagcattcttttgttaannnnnnnnnnnnnnnnnnnnnnnnnnnnnnnnnnnnnnnnnnnnnnnnnnnnnnnnnnnnnnnnnnnnnnnnnnnnnnnnnnnnnnnnnnnnnnnnnnnnnnnnnnnnnnnnnnnnnnnnnnnnnnnnnnnnnnnnnnnnnnnnnnnnnnnnnnnnnnnnnnnnnnnttcctgtatggtcttttgtagggcctgggtcttttctttatccacttggacatattttcctttctcatccgatgcgacagatgatgtggatggcttgcgatgagggctctgggagaccggctgaaagtccagggctatgtaattcacattgccagtactctttttggagctaggttgttagtgccactgggtacaggggatgaagactttgggttctgcatagaaacttagttctcctcactgtctctggagtctgtgctggtgatgctttgtgtggagatggaacggcagtactgagagaaacaggagttaaaggtgtggttgactgagaaccaatacttggtgacaggtgacttgaaaggaagcccattgatgacagtgttgtttctcaggtcaaggggtattggtgcaagtgttgatactcctgaggttcactgatagacatggcaggctggatgtggcttgacacagggggctggctagagtgtgaaggagataaggactttcttgctcggagcaggtgctgactggagctgctgaactcagctggagaagagcagagactatgactgaccgaagaaaggtttctctgggtgtcagtgctctctttagtctgactgaagccacagatctggcagatgctctggacccacctattaatgtcagcctctgtctcagccacaagatagaaggtgagctcattggacttgatatcctgccggggtttcttggagtgttcattcttgtagtagtcagaacatctgggtcaccattcatttgacctctccgcagaataaaccagcatttcttccaagcatagtgccccaactttttctcaggaggtgatttctccagccagcgcacaacacatcattgccggctgactggagtcctcaacaggctcaagtggacaagagcatgggctgctgggtcagctggcagctggtgcacagctcaagagggagggattcctcagtgaaggatttcccgtatttctttaataattttcttagcattattacttaatccaaagttaaaatgaaatcttaccagtaccttgtctctttaaactttctctgtgtgattgactgtgatctctattccaatccaactctcttaagagctgaggcaccccttttccagtcttttgccaatccaactccctcaggagttgaggtacctattttctagtaccttttgcaatccaccctcacaactccttacttgctttccagccttctgcgggtgatctctcagggtcccctttctttcccgatctcagtgaaacctccatttgtggctgctcttggccactaagtctgagtattgggcaaaagcctggagatttggatgaaccacaagactccttcctggtccttttctgagagaatgtctcccacctttcttgtagagcagccttatatacaaacttacaaaaaccccaggtcaaagggttcacaacaggatattgatcccagtggggtgaggtcaggaaaacaggaggtacctgtggttatgctggaaaacaactcttagagaccccatgggggctgggttccaacatgtgtctgatttcacccctcttgaacccaccctgccctgtggtcccctggagctggactatggcacttcatcatgaatgcttaattgtgcatgcctcaattatttctctaccaaaaccatgtctccattggtatctaacttgttccccaagtcaggtctagttatccatccgaagtaagccaactagaagagccaaattaaaatagaagcagagaacggagatttattcaatttgactacattccaaagaagaacaaagagatccagtgaactcccctcagagtccttcttcagggtgctggaagtgagactggtcaaagaaggatgtcatttgaacatcattatctggggttttgtctcatcctgtaaaatggtctggcaagtcattacaactttccagactgggcattggtggcacacacctttagtcctagcacttgggaggcagaggcaggtggatctctgtgagtttgaggccagcctggtctacagagaaaccctgtcttgaaaaaccaacaaaaannnnnnnnnnnnnnnnnnnnnnnnnnnnnnccctctctgactgggaattttctgtctcccaaaagacattgttatgcccaggacttgggaccttttgctaaaaggtagcttatgctttaggcatatccagaatagtagtgaattgccatcgagcacctcctttaaaggtcactgtgtggtgttgagtaagccagctggaacacctcccaagcatttgagacgtcattaaaggttgattacaccagcgggaggaatttttccctcattagtaaggcttgtgtgccatctttttctttgttgcatggaatgggacggaagaggggggataatctctcaattgttcttccagctcctgtgtcctgagtaactgctggcctcctgagaatgccaatgccctgatcgtctgaatcccctccctagctcccatggtagtggaagaccatcatacccgggaagaaataatcttgtatcagaccagaagagatttcgggatcaccgctgctgttgttgccgctattgccatatttcggacattgccattgctcagtctgcttccaacgaagaaactgttaataaccttgctggcagagtcagcgaggccctggccatgcagaataccctaaattcccatattcagtttgatttctgtaaaaaatgtttctatgggagtgtccagattgaatgcatatttggctggaccctggaatgattcttttgtaaagtttacctatgttttggctcatcagattgtagaaattaataagatgagggttgttccactctcaggcgagtggtgggggaatgccatgacccagttagggggctgggtgcagtgatggggaggcactatgtcctttaccattatgggagtacttctgctctgtctggggttatttgcactatgcaaagtccagtggaccttccaacagaaggaacagatacatagacaagtcctacttagcctcacccatggttctcctgatagccatgagatttggctacagatgctcactcaacaagagatctgaaggggtctccacgacaggcaacccatgggacactgccccacctaaaacaggagatcaggccctccaatgacgggtaaggggcaggaaagcctatgtgacctaagacggggacccctcatataaaacaaaaaagggggaattgtgggaacaaagtggccctggcagaaacccaacaaccacctccccccaatgcggttgcaaaacatgtttactggagcagaatgttatttcccttctgggaaatctctggcctaatctgttccgagaacaccatgtccatgccctgaacccaggcttgtgactagccgcttcttcctaagttccccctccctcttctggtgctagggtataaaaccaccccaggagaaaaaaataaagggccttcttaccaccaagccagctccctgtgttgttaatcccgacatgctccgcagatgcagattctcagtcccaggccatccggcgcggcaacttccctcagttgttttttatttccccactatatagtaataaaaagacccataannnnnnnnnnnnnnnnnnnnnnnnnnnnnnnnnnnnnnnnnnnnnnnnnnnnnnnnnnnnnnnnnnnnnnnnnnnnnnnnnnnnnnnnnnnnnnnnnnnnnnnnnnnnnnnnnnnnnnnnnnnnnnnnnnnnnnnnnnnnnnnnnnnnnnnnnnnnnnnnnnnnnnnnnnnnnnnnnnnnnnnnnnnnnnnnnnnnnnnnnnnnnnnnnnnnnnnnnnnnnnnnnnnnnnnnnnnnnnnnnnnnnnnnnnnnnnnnnnnnnnnnnnnnnnnnnnnnnnnnnnnnnnnnnnnnnnnnnnnntggaagagtggatcttactaccaggtagagctggagatagatatggatgaactcttggacatggaaagtgataatacccgggcttctagagtcaaagagcccttagttgactgttacaaacccactgaggccttcatctctggcctgctagacaaagtccggggcnnnnnnnnnnnnnnnnnnnnnnnnnnnnnnnnnnnnnnnnnnnnnnnnnnnnnnnnnnnnnnnnnnnnnnnnnnnnnnnnnnnnnnnnnnnnnnnnnnnnnnnnnnnnnnnnnnnnnnnnnnnnnnnnnnnnnnnnnnnnnnnnnnnnnnnnnnnnnnnnnnnnnnnnnnnnnnnnnnnnnnnnnnnnnnnnnnnnnnnnnnnttaaaaaaaaaaaaaaaagacccataacaattttcagttttaagttttacagaagcaaaggcagcagttaacacctcacagtccatcatcttattcttatctcacttgcaggagactaggagctcccatgtattccagagcaaaaggtcaacagcccttaagggatgatgcctagctccatattaagtttctgtagtcatcaccagagacctaatgactgagatagattggttcatttctggtcaggcaaaaacatggtgccattgggttagggctggctgtcacatcctcataatatttaagagacaaaacctgcaaattttggccatttagacacatgggcaattgtcacagttatcttgaaacagagcaagccaggccagctgttaacctgggccatgctgcctgcctggcagaattatgctgtttctgatgagagagagcacagggcttaatgagcagctgttagcctgggcttcttcccagaactgccaggcagaaacatggtccttttgatgcgcaagcagtcctggtcaacagactttaacaaaaacatcctcagtnnnnnnnnnnnnnnnnnnnnnnnnnnnnnnnnnnnnnnnnnnnnnnnnnnnnnnnnnnnnnnnnnnnnnnnnnnnnnnnnnnnnnnnnnnnnnnnnnnnnnnnnnnnnnnnnnnnnnnnnnnnnnnnnnnnnnnnnnnnnnnnnnnnnnnnnnnnnnnnnnnnnnnnnnnnnnnnnnnnnnnnnnnnnnnnnnnnnnnnnnnnnnnnnnnnnnnnnnnnnnnnnnnnnnnnnnnnnnnnnnnnnnnnccggttcaaaacaacttttaaaccaaaagcaatgcttggtgttttgctatcttggctaaatatcaagccaggaacatcctgtctttggtgatagacataggcacccattcccaagaacaacaatatcgttcaaaattcaacaaagcatatttatagaaataagggtgagttgacataaactgtttgcatacagttagcttagttaccactcaataaagctgactcaattcctcatggccagaggtaatttattacccattatttccataacaagaaaggacaaccctgggctggagagatggctcagaggttaagagcacaggcagctcttccagaggtcctgagtttgattcccagcaaccacatggtggctcacaaccatctgtaatgagatttgtgccctcttctgacctgcaggaatatatacaggcagaacactgtatacataataaataaataaataaatcttgaaagaaagaaagaaggaaagaaagaaagaaagaaagaaagaaagaaagagagaaacaaccatgatttacagctggccattaggctcatccctgtgtcaaagaacacacctctaataggcttggagaggggcctgggtgtgtatggggagggcaggcacatccaagattaagtcctagtctgccactaagttcctgtgcttttaccaagaaaagcatataattctgtcaagtaggcaagatgaacctgggtaacaactatgtgaaaagaacaatcctggggtacttaagaagtaattctggcatcatcctttgctgtgtaaatctcccctctgcccaagtagccagacttgtagtctctatttaaattgttcaaagtgtaacctggggttgggtcctgaaagagatttaaggatggcagtgtatgtagaaagtatacactgataacattttgtatttaagactggttcctttattagccagaaccagtcaagggctattattaaagaacgttttgttagacccccggaaaactcaggcctccggggtctcagcccaggaccttggtcaccccaatcaccaggcggattcgaaagcttgctgcaaactgcatgaggctttattgttgtttaacgagttagccccatgttagctggtttctttcagccccccgccatggtggatggctagcaaagacagctcgaaggggctgcatagagatcttgtagggcagtgtaaggggagtgtctaggagtacgcacaggctcaggaatggtgtgcctccaggcatggagggcttgccctgtgttgattggccaattggttgttatgacccatagaccctcccagggtggttgctatgctctgagcgtcattgctgtgcacttgtgtgtaaagcacacccagagccgtaaagcatagtgccaccagctaacttctgattggttccttgccacgaggcaggcatctgacctcttagtgaccaaggcaaggtcatagcgagcacgtgttactgtcatggctnnnnnnnnnnnnnnnnnnnnnnnnnnnnnnnnnnnnnnnnnnnnnnnnnnnnnnnnnnnnnnnnnnnnnnnnnnnnnnnnnnnnnnnnnnnnnnnnnnnnnnnnnnnnngaaatagttggtcatgatgaccagtctctggagattgttattattaatagtttccaaggaatattattatcttcaacaactgtctggtttctaaaaattgttatgggttaccctgctccagagcacccaggttttaaaaataagtcaagtcactctgttccctgaaaaaccactagctattccatggccttgcaggtgtaaaaaccaaaataacattccaaacccctcatgggcaaaattgtaagttcagttcccaaccaatcagtaaatgactcatgtatgttataaccaatcaatatgttgtcacactcctgcctagtgaccaaaaagatataaaaactgcctgctttagaaactcggggtcgatctcttctcagagaaaagagtcattctcttctcagagaaagaccccaacacattggaataaaatccttttgcttttgcatcgaacttgtgtcctgtgagtgactcttgggctgtgactcccaaagttggtcccccttttgggcccaacaccaccagtgccagcaacagtgaccgaagaaccagaccaggtgagagtctgtggattaagaaggacacaactcaggtcattccatagaaacgaaagccatcagtttattgcagccagcagtttatataacaagaggagatggataaataccacttgctagcagaacgcattcccatgccccatcataaggaaaccacaacccccacccactgcaaacaaagcaaaaaggggatgggggcaaggcaatgtttcaataacaagaaaggttcataacaggatgttagtgggcgaggcttagaaaaacaggaggtgcctgtggttatgctggaaaacaactcacagagatcccatgggggctgggtcccaataagctggggcatttgccctacccttctccaccccacccctttttgggggggcactgtaatattacttataagttgaacatttggtaaatgctcataattgtagaaatgaatagtttagtaactatcttcttaataaataactcagttcagtcttacaactcaagagttcagatgcaagcaatggataaattaaattatatctgttaagtttcaaaactgagtcaaacgctgaagtgcctgcatctgtactctccagcccaaaggctgggctgtccttcctccagaggctcttccctatataatccagacatttgggttacccttcttttttagactattggtctgctggcagctgtacctggttcctctctttgctcccttcacctccccttctctgcacatggtccagctcagcctagttgtgtccactttggactcttccagatgtccctgcccctggttcctttattagccagaaccagtcaagggctattgttaaagaaccttttccttgttaatctctaaatgtgcttttatctacaataaactttctcctccaccatacctaagagtagtcatgttctttcctttcctttttcctttttccagtacccaagcaagtgtgattgcctgtgcaatccaagaataacctccacaccaactcctgcaggaagtttgatttactagatcttaattcttgcagcttctctctccaatgaattgccttatgataaatcgctagcatgagctttgtgggtatctgtgaatttcctgtttgtttcctggtctggtaacagcacaggctcacaccggtaaaccattactgtagaaagagctgaaccccacccaatctttagctaactgatggtgtggtaccacctagtggtaacctaatttaatgagcacaaagtcctacctaaaaaaagatttttaaaagacaaaacagaaataatgaaacagtctgatgtgtaaagaacaaagattctagcaggcaaaggtgcgtgtttctttaattgtaagatatggcagaaatacttattactgataagtagatatgccctaaagtttaagagcaattttgtatcatctataacacattgttttttccctctccctcttgtaagcaccacttcactgatttaatacagttgtcccctaacccttcagtttccacccttcctcctttgctctttcctctacagaaaaaccacaacaaccccctttcagaagccagccttggcgaccccccatgcctagctagccgccagccagnnnnnnnnnnnnnnnnnnnnnnnnnnnnnnnnnnnnnnnnnnnnnnnnnnnnnnnnnnnnnnnnnnnnnnnnnnnnnnnnnnnnnnnnnnnnnnnnnnnnnnnnnnnnnnnnnnnnnnnnnnnnnnnnnnnnnnnnnnnnnnnnnnnnnnnnnnnnnnnnnnnnnnnnnnnnnnnnnnnnnnnnnnnnnnnnnnnnnnnnnnnnnnnnnnnnnnnnnnnnnnnnnnnnnnnnnnnnnnnnnnnnnnnnnnnnnnnnnnnnnnnnnnnnnnnnnnnnnnnnnnnnnnnnnnnnggacagggccaccccccccccccaaaaaaaagtagagcccagcaaatggaaggacaggctcaaggatggagacttgaagagtagtcctggcaacatagcaatgaaaggccaaaccagagccatcctagagaaaaagggccaaaaacagcactatgtgaaaacctgaccccatgacctgtgcagatggcttacaccccccccaaaaaaaaacccaccaccaccaccaccggaaaagctgacaggcaggaaggggagataactacaaacaggcgggaaggggagacaaatggccctgaccccagggggcaaccaacctgaaaaactgagaagcaacttttctggacacaaatgggtacaagagataaacctatgaaaagtccccaattccccaggactctgcagccaatcagcttcaaacctgtacccctaaccctattctgtgatctttgcctttatcaacccctcacttatgagacttgagacctcctcctgcagctgctgtgccagtctgtggaacgaggtcccttctggaaaggtctaacatggaggataaatgcaagttatgaaggtctgagaatggaaggtataaagatctgaaaatggaaggtctaagatggtaattaaggtgcatgaattaaagttatgaaggtctgaggataaaaagactcaagtgatgataaagtgagttgagacattaaaaagaatgaaatatgatcctgatttctctatttctcatgctactgttcatagtcagtaaagttctacaataccactagaggttcataactacaaggtcaagattgaaaggttcaggcattatgctggcctgcccctgttacctggttgaacaggcagtaccctggtcagcccaaggttccatgggaactaagtctgcacgcaggtgtagaggacccctttaaaagataggcccctgcccatttacgctctctgttcctctgtctctctgtttctctgttcccgctctctctgtttcccgctctgtctctctatggcgaccagctatggcagtcagccatttacccctgttcctcttcttggtctccccattctgccgggccttataataaacttatagtcttatgtctcatgtctcagcatttctcttttcttctttttaaacaaaacaataacaaagattaagatgctttttattatcctaaaaaaatctgtcaattttaaaatgttaatgctttcagccaagttgcttctaacaaaatatgctgctaatatgtctaatacttatgtttccacaaactctaaggattattgtaagttccagggagccgaattggatccaaacaaacaggggagattcactccagttattcaatcttcccctggtcccaggactcccttcccttatcttgggacacctcgggaacccctccctcatcttacaatcttccctcaaataccaggacctaagaaaaaaaaatttctaaattcaaccttgtcctctgctctgccaacatctttccaggcctaagaggctccagggagttccatacatcccgaactgcaatgaaacaaccatctaccccaggacgtggcagcaccccaaccttctcagatcccccaaagatggtcaacgccccaggtcagcaggaatcagccttgagatttcttcatccctacttccctaacctgccacgcccaattcaccaacttttataataaaccacagccgggattgtaagaacaatacatttggatgaccccacccccctaacgacaggtggggcacgcacaggaaaacgtgctacgtcatcaccaggtcacccacaatgcattatggcctgcatgagaactctgcgcatgcatgaaacctcagtgcgcatgtgcagccttcccccccttctccctctttgactcctcttgggttggctgacaacccaactccatcctccccctcttctggtaaataaactccccatgggttgtccatccttagcttcctttctttacaactacagctgcagcttaaaagaaaaacaccttcgtaggcttgaattaaaacaaaacaaatctttgtgcacttgcatttggtaagtcggctccttagtgatctctcttggggtcttgtggactaggcataaacaagcaaaatcccatctcaaaataaaattttaaaatttatctcaaaacttaaaaaaaaaaaattgtcattgttaggtcacaaagtaggccccagaatggctgtgctgtagacagtgtcctaagatgacagcctgggtccagcccaggccagattcttatttcataaatagaaacctaactaaactcagcattccagggctggagagatggctcggccgttaagagcactgactgctcttccagaggtcccgagttcaattcccagcaaccacatgatggctcacaaccatttatagtgggatctgatgccctcctctggcataaagttgtacatgcatatatacagctctggatatgtatatattgagaaagagagggggggggagtgtgtgtgtgtgtgtgtgtgtgtgtgtgttgggttgtttgtcaggaaagccactacttcctttctctgctcagcatctagttcctgattaacccaaacaacctgcagcagctctaggacttccccattatcacttaaattccacttgttttcccactgagcaggtgctctcttttcccagagctcagcagtttgtcacccagcatatattttacctacagaatggtctagttcagtggtttgtcccctttctcagaagtccacatgacttaaataggaagaaaccagagacattaaggtacagtagggataactagtgtttggtaagctagtcgggatgacattgacattgcattgaatgcaactctctccatctccctcctccctccctttctgccttctcaactctaacttgctctctctttcttgacaagatctcaagtctttaaactcactatcacaccccctcgcccgctaggattatgaggttacaggtatgtgtcatgatgcccaattcaagtatgctagagattgagcctcagagcctgtaagcaccaggcaaggactctaccaaacgagctgcatctccaacacctatctatcttcctcctcccagcctctccctctccctctctctttctgacatttttttaaaaataaggtctctctctgtgtgtcttagctactctgctattgctgtgagaagatgctatgatgaaggcaacttataaaaagaagcatttgcgggctggagagatggctcagaggttaagagcactgactgctcttccagaggtcctgagttcagttcccagcaaccacatcaccatgctcacaaccatctgttataagatctggtgccctcttctggtgtgcagatgtacatggaagcagaatacataataaataaaatcttaaaaaaaaaaaaagcatttgccaggtgttggtggcacacacctttaatcccagcactcaggaggcatcaccatgctcacaaccatctgttataagatctggtgccctcttctggtgtgcagnnnnnnnnnnnnnnnnnnnnnnnnnnnnnnnnnnnnnnnnnnnnnnnnnnnnnnnnnnnnnnnnnnnnnnnnnnncctttaatcccagcactcaggaggcagaggcagtcggatctctgtgagttcgaggccagcctggtctacagatctgtcaggagacagccctggttagatataaaagtctcctttacaagaggcttggggacctccatctaaaccaccaatttagtcaagcaccccaccccttaggttagtgttctgagataaaccacaggaatgttcccggacacctgcccaggcctgagggcattaaaacacccactcctcccccttccttacttcctctttctttacttcctcctttctctttaaaaactccttgcttaagttcaataaacagaccttggcaacccattgcttggtcttgctctttctttctctcccatttagtgttctgagataaaccacaggaatgttcccggacacctgcccaggcctgagggcattaaaacacccactcctccccctcccttacttcctctttctttacttcctcctttctctttaaaaactccttgcttaagtttaataaacagtccttgacaaccattgcttggtctcgctctttctttctcacccatttattttcaggcttagtccccctcgagactcacgaattaccagaaccccgagggcgggggcacagatcgagttccaggataggctccaaaacaatacagagaaaccctgtgttgaaagaagcatttaattgggtacttgtttacagttttagaggattattccatgattgtcatggtgggaagcagacaggcttgtcactggagcaatagttaggagctttacatcctgatgtacagacagcaggcagaaagacacacagtgggcctggaatgggcttttggaaccacaaagtcaggctggagagatggctcagaggttaagagcactggcttctcttccagaggtcctgagttcagttgccaacaacatggtggttcacaatcatctgtaatgagatctggtgccctcttatggcatgcaggcatacatataggcagaatactgtatatataataaataaatcttaaaaaaaaaaaagaaagaaaccacaaagccaacccccaatgtcatacctcctccaacaaagccacacctcttaatccttctcaaacaaacagctccactaactggagaccaagcatgcaaatacattagcccatgggagccattctcattcaaaacaccacagtctcaaagctcacagcaattctgcctcagtcccctaaatgctggaattaccagcctacaccactacatgaccttaaagtttcatttccattctaatatctgtaattctagagaaaacagagagtcacccatcaccctcttccttggtttccttttctgaatgagttcctgcacagatcaaagtagaaactgtatataaaggacagagtataccgtttcaggtgatcccaggtgtgggcatcttcactattaacagtggcaaatgataacctttgacctctgtgtctgtctgcaggagacacagaaagttggtgagcatggcaggttaccttctcatctttccacaaggcatcattgcaacagagtagcttgagcttgttgacaagaaggcttctctctcaccttcaacagcaccacatattttgtatactttattattagagccattggttgctgacagttactcagctgctattttcatttagctcccttggttgtgcacctaccatgactctcaattaaaattcctaacagaatccaagtctgaaaccagctggcctcaccctatccatttcatttcatctcccattgcttggcccccagaaagctccactccagccaggctgagctctttatccatagggaacctatgcattcctgtgttagactgtgtgctggaaatagctctctctttctcatcactgagtttaaatccagtaatgggatatgacttgctgtttaagtgcattgctcttgaacaagtgttctgtttgagatgggaccccactatgttgaacttgtccttgaactcctagattcaagcaatcatccatacggtagtcccagtagtagctgtgctatcatttctagtttactgcaaattaacatcaggcaaattacttgatctcaatctctggttgtcaggtgtggtggaaagtgcctttcacctctgagccatctttccatcttatttatcttgaaaattggcatttgaaaaaaaaaaaaacagggtgggttttaaatggattatgatgaattttacaggtgaaatgacaaatctgggaacttgaaaggttgtggaggttgatactcctcaaccttcctaatgactacaaaactttaataaagttcctcatattgtggtgatcccctcccaccaggccatgaaattttcatttgtacttcataactgaaatcttgctactgttatgaattgtaatataataattttggagacagaggtttgtcaaaggggtcacaacccacaggttgagaacctatgatctagggttcttgttgctttatcttggttttataaagtcctgtttcgttcaacatcttgtgtgacttttttttttgttctgcccccccccagccatcactagaaatagtttagtatctatgaatgaaattgtaagagaaatagaagaaggcaaaaaaaaaaaaagatatattttatttaaaaggatgtgtaggactggggaatgtaggcctatggcatagcacttgcttagcaattgcaaggcctaaaattcaaaccccagcacagcaatggcagtttaaatgaaaatgtcccctataggctgagatgtttgaatagttggtttttagttggtggtgatctttgtgtagctttaggaagtgtgtccttgcctgagaaagtgtgtcattgagaatggcctttagaagccgggcagtggtgatgcacgcctttaatcccagcactccggagacagaggcaggcagatctctgttggctgtctctgcttagtgcttgaagttccaggtgtgagccctcagcttcctgctcctgccaccctgtcttcactctgccatcatggactctaactcttggaaaccataagccaaaagaaactcttttttttctttctttatttctttcaagttctttcttttaagctgtgtttaaaggtgtgcaccaccaccactcagcaagaaactcttctataagttgccttggccatggtattttatcggtgacagaaaagtaactaatacaatagcaaaataaaacaaattttcaatatatatatacatgtaggagaaacaaccatctaaattggaattaatgaagatttatggcataaggattagtgggctgtagtagtatggtataattccaactactaggaaagctgaggcagaaggactaccttgagttcaagtccaacctaggttacagagtgaattccaggcctgctggggctacagagtgagacagggccttactcccacacctgtgtgtgtgtgtattctacaaacagaatacaaaagatcatcaaagtagtacatttaggtcttaggtggatgttcaccaaaaaatgttaggtagatgtggtaaaacatgcctataattctaccacgtgggaggcagaagcagagaatcactgcaaggtcaagccagtttgatctacttatcaagttccaggccagtcagagcggctagtaagactgtttttgttgctggttttatttttttaaggcaaaaaaaggagagaaaggtctcaggtgtagttcaagcctgtggcctgatgctccggaagcaggggcaggatgattgctacaagtatgaggccaacctagcctacataaggaatccaggcagatctggcagttttgttagaaacaaataaaacagttaaaacaaaaattggcatctggtgtctcattgctgtgatctcagtgctctgggattgaaacaagagggatcacctagagatcaatccatatcactgtccataccaggagtttcagaatggcctgaactaggaattttctcttttttttttcaagacagggtttctctgtgtagccctggctgtcttggaacatgcgctgaagatcaggctggctccaaactcagagatccaactgtctttgcctcccaagtgcttggattataggtgtgtgctaccacatttggctacttgaactgaagtaaaattaaaaacaaacacccagccaggctatggtggcacacacctttaatcccagtactcagaggcaggaggatctctgtgagttcaaggctagcctggtctaccgagtgagttccaggacactgagagggctgttacacagagaaactgtgtctcaaaaaaaaaaaaaaaaaaaaaaaaaaaatcaaaaccagccaggcagtggtggcccacgcctttaatcccagcactcaggaggcagaggcaggcagatctctgtgagttcgaggccagcctggtctacaaagcaggtttcaggacaggctccaaaactatacagagaaaccctgtctcagaaaacaaacaaacaaaaatcaaagcatactctcaaatcaattcatgtctagcttatgaataaaattttccacttttacattttcagaaatgctatgcatacatgtaaaggggtagtccacacaagtgagctccacactggggcagatgacatgttgatcactccttgctcatatctgcctgccaaggaacatgtcggcagggagagttacattaagcagctcacaaccaactgtgactcccattccaggagatctgacatcttctctggactataagggtacctgcactcatacacacacacacacacacacacacacacacacaccacacaccacacaccacacaccacacaccacacacacacacacacacacacacacacacacacacacacacacggtacataatttaaaaacctttagaataaataaataacagtaaattgtgatggtgcacatctttaatctcaacactctagaggctctatatatcaaattccaggccaactaaggctccatgcagagacactgtctttaaatacagaacatatcaaagcctggagcacaaagtaagacccaagtcaaaagaaagagggggaataaaaggaagaggaggaaaatgaagaggacaatctgctgtttagttgtttgccaactaacagtctactagagattaagaatgtcctttgtctttttgctgcctccctaacacaccttctcaaatgtttttaaatgtagtctcaggtcagttaactcacttcactctttcaagagcctgcagaattattccagtcagtgctgccctggaagcttttacctgctggagcaggtgattcacccctttgaaatctgggacaccagatctagaaacctgtccttaacagttttgttttgtgtccttccttccttccttccttccttccttccttccttcctttcttccttccttccttcccctctccctctctccctcctcctctctcccttcctcccattctttctctttctttctttctttctttctttctttctttctttctttctatattgtcaaatgtttaatatacactgtactgtgtaacacgaataaaagacccagagacagatattagggttcaagcttcaagttgagtatcagaaaagcaaagcaacctgccgccagctctcacctctagctcaggctgatccatgcacaactatcaaactgctgcctcccctcagtgtgtctggagaataaatgcctctctgagaccttgcttctgtcttatatacgtccctaatgttgagattaaaggtgtgagcaataattcccttttagactgattcactcttgtgtagatctgggtggccttggactcacagagatctatttatctcttaatcctgagtcctaggattaaaggtgtgtaccaccaccacctcctagcttctggttgctggaactaaaggtgtgtgcctggcttctacagcttttggctgactttgttttctgaatcctcaagcaagctttaataaatcataaataatatctactacaatactgagcttcacatggccattttttaaaattacatgtatttatttcgtgtgtgtgtgtgtgtgtgtgtgtgtgtgtgtgtgtgggtgtgtgtgtgtgtgggtgtgtgtgtgtgtgggtgtgtgtgtgtgtgtgtgtgtgtgtgttgggagaggtgttcacaggtttcagagtgtatcattgctgaaacaaagctttgaaaataacaaggtctaagatgtttttgtcaaatagctttaaggtaaaaaaacccaagaagtggcatagctgagtgatagattcattaggttaggaaaagaacaaagcagcccagttatcattagctggcataccttctttactagggttggctgttgatcaaagatgatgattaattctttgtacccatttctgcactcaatatcctgctattaaaaaaaaaaaaactgttgatgagtgggtatgccccctaaagatttaaggtagagctatttttcatatgtaaaggtttatgtttgtgattcttttaagattcattataagattacctttcaagataagcaataaagtgatgggtccttctttgtaactgcaatatgaagcttgccagtaagagaactggacaagaaaaatactctgcttgctcacactcccctagtctataacaagttgcttggatgtgaatatatgtaggttcctgggatgacgttgtttaatcatgtaagggaaatgggaaacaagttcttttgtttgtttgtttgtttaacctgtattcattacaatcattcacttggaaaatagaatataatcgcattgtaatttttatattgcttgaaagattctacttgggtatataagttgaaaaggtaaaaaaaataaagtgagtttgaagagaaacatcaagaacaaatcaaggaaatcaccaggaaagatgtagaggaaaaataagaagaataaagaaaaagtcagaagaaaacaatcaagagggaatgtatgtcttttcccttactccttcagataaaaaaaaaaaaaaaaaaaaaaaaaaaaaaaaaagttttagtttgcagactccatggaaccctgagttgctggaggctgggccccacagcagcagtgtgtatgcaacctggaatcaagcttgggttttgcagagcaagcaccaccccagtgaaccaactcacttgaccactttcttagattgtataaaattttaccaacagggaaaaataaaagttctatgtccttgtaaaatcatcaaaaccattttaacctgtgtaagtattttaatctatataaaattccctgtcaggggatatagctcagtggtagaatatttgcctagcatgcacatttacacaagaccctaggtttgattcctagtaacacacacacacacacacacacacacacacacacacaggcacacaggcacacaggcccttctgttctacagaatgagtttagctcaacgaaggctacttagtgagatcctacctaaagaaagaacggtggaaaagccaggcgttggtggcacatgcttttaatcccagcactcgggaggcagaggcaggcggatctctgtgagtttgagaccagcctggtctacaagagctagttccaggacagcctccaaagccacagagaaaccctgtctcgaaaaaacaaaaaaagaaaaaaaagaagaagaacggtggaggcagcaagggttgggggggaggggtggagggtacagagggggagaagtactggtggaatactcctggaatactctaggaataatgaacattccttaactttgaagaatattgtcactgtagaagtctctccacagactgaagaactctggctcttccccctacctttagacttcagattatgtcataattagtacctacaactatttataggctgtacttttccaaggttgtaaaactttaatcttcccatatgccacagagagcattaaactataatggtgttttcaaattgctgtatgatattagtcttctgttgttttctttgtttttttttgggggggttgtttgtttgtttttcaagacagggtttctctatgcacctttggagcctgtcctggcactccctctgtagaccaggctggcctcgaagtcatagagatccacctgcctctgcctcccgaatgctggaactaaagttgtgtgccaccacctttagttattgttctctttgttgagagggggtttcactatgtagtccaggctatccttgagctctcatcaatctttctgcctggttcagattgagaaatcagaatttgtcaaaatcctcagcgattacagaacccgaaaactcattttaagatactacaaaaattcttcctcctctttatttgtatgtgtatctagagtaaatttactatcaagtttatgcttataatcccagtaggaagctgaagcaagagaaccttgaataccaggctggccttgggtatatagcaagatgcaagaggaaaatgagaaaaggtagttgcagcttccaaggcgttaagtgcctgtaattccagcactggggaggtggagacaggaacaccaggagtttaaggttgtcctctgctacatagctgattcattgccaacctggcttaagggatcttttctcaaaaaaaaaaaaaaaaaaaagtataaggaggggaaagaaaagtaaaaggaataggaggaggaagaaaagtactatgaacaaagaggcaagcacttccaggacaaccagccattcagagtttctgttatttcctggtacatccagcagtgggagggaaggagaaacaacctgtgttgaaggttgccggcccaaaatgttcacagctatagtcaataaggtttagccctcactgtagcaaagctgagatgtttgtaattagagtcaagtttatgctagatgactgaaggaaagtttgttgctttgggtgctgacagaaagtgggggccttctggtggttgggtatccttttaaaagtttgtttgtttgtttgtttgtgttatatgtgtttgtagggggtaatgagtttcctatgaatgttagaagaaaacttgtgggagtcagttctctccttccactctggagttccctggtgggacaggtttgttcctgtttagtggtaaccactttttcctaccgaacctccaacttgctatgtagccaagagtgagcttgaacttctgatcttgtctcagctgcctgagtgcgggtatttcaggccagcaccatcatgcccctgtgatgctaggattctaaaatacctatggtagagtttagatctaaccaaaccatcaacaaagcagctgcaatgctcacaatagccagaagaggggggtgtttactcatttctgtaattcactctgtggttttctttctttctcttccgtccttccttccttccttccttccttccttcctttctttttttctttctttctttccttctttctttctttctttttttcttcctttttttgtgattccaagcaggtctttaatttttttatttatttattctcactctggagcagtggcagagtggactatcagcctccgaagttgcatcagttccacgagatgagttatgttcagcagcggacatgtgatttccttgttatcacctacctagatcctacctgaacagttcctttttcatgtgcttcttgtctgtaatgataccatcaccaaataaacacccaggaaggtccctcagtgaggaatgaagggtataagtgaagcaagatgattaatttcttcttttctttctttttttttgtttttgtttttgtttttgtttgtttgttttggtttgttttggttttggtattggtttggtttggtttttggtttttccagacacggtttctctgtaacagccctggatgtcctggaactcgctcttgtagaccaggctggtctcgaactcacagagatcctcctgcttctgtctcccgagtgctgggattaaaggcttgcgccaccaccacccagcccggcaattaatttcttattttggctattgtcacaaaaacatcttccttcacactccaatgccaagaggagattcaaccagtctccagtgtggttatctgcagtcaggatctgaaataaagagtaatgaagatgttttccaacattgaaccaattgtgaccttagactggtccaaatttgcatccaactctaacattcactggctgttagagaatgttttgaattagtccaggcctcagtttccacacctactgtagaacaactgaaaaatggtacttaccttttgtggaagttaggggaactaaatggaataacatataagacggtggaaacagcatataggccatagtcagtgtttaacgtgactgtctgcctttgtcatttgtcagagttattttttttttcttggcaagccattggtcccattagaaatccacccagggggtgaagaggccagtgattaataatttgtgcactagatggcactcaaaagaggagctgattgttttgtacttctgggtctttgaacttaaaaacccagacttagtaaaaggagactgtcatctaaaaatactatttaaagattggggagcccctgcagaagaagagggtagctgtttcaacagagaatactgtgatcttttgtcaacaagcactttgtggtttaagcaggttttctgtggtacggaagagcaaacagggccaggataactaggatatgggaagggtgtggggggtgatctgagaatgacccagaggccagcctaggaacacttgtcgactcaaacttagtgagggccaaggtccaggggcctgggaaggaaaagagatagaccgaagtttgactaacaagcactttgctcttggcgatcagtgagagcaagcatctgagctaatcatttatcgtttatcaagcaaagaattgtgagaccttgtgtctgtccttatcctaagcaaacaagaaggcttgttaaagtcctacaggaagggtgggttttgtaggaagctcttttccagaacacagattgtggatgattttttttaaactggttttcaagaatcacaaggactgagtaaaattggacactgacagtagcaacttttatatttcttgtttagtgtattgtatttcagataaaggatgaaatgcaggtgtttgctggacctagggagttagggatatttacacacagagatcctgcttctctggcaaactgccttgtttggaacactctttgcttggcggtgtggcctttattataatttctttctgacccaaaattaggtaaaagtcaaataaaactttctttttgagtcagggtctcaagtatctcaggctgtcctcaaatttattgtacccaaagatggacttgaatttatattccttcctccattttccttgtgctgattataggaatgcagtaacacacctggtttaagaagtgtcagaaataaatccagggctttgttcttgttagaaaagcactcaaccaactgggctatctccccagcatcagacaaaacttaaaatgagaaacatcagcacaaatgctgaaacttcagtttagtctcaaatcaagccaggtggtagtggcgcatgcctttaatcccagcagaggcagagacaggtggatctctgagagtttgaggccagcttggtctataagagctagtttcaggacagttagagttacactgagaaactctgtctcaacccccccccccaaaaaagaccactgagccatctctccagcccccaaaattaatgttttaaaagacctacaaaccaaaaatagtctttgattttattttatattttgtgtagcactgggaattgaatgccaggtccttggtatgttaaataagtgtcttgtccagtgttctgtcactgtgaagagacaccatgaccacaacaactcttagaaaataaagcatgtaattggggctggcttacagtttcagaggtttagtccatatcgccatggcaggaggcatgctggcatgcaggcagaaatggtctgaggtaactgagagttctacatctggatccataggcaaccagaggagaaagagaaaggcagaggtcctggcttggcctcttgaaacgttaaagcccatccccactggtacaccccctccaacaagtcacaccacctaatttctcccaaacagtgccatgcccagataatcaagcattcaaatatatgatcctatggggccattctcttgcaccacaacaagagatctatcactaagacacaccattagcctctgaaagttgatttcaaataagctaaaatggagggtataaataatgaatcaaccatacattgagacatacagacatatcacaatagacacttgaaggcttattagtctattatttgagtgtgtttggaaatttctgtctcaaaaagcaagaatgtgttcagtattttctcagtttttggggatctgtggatgatgtttgaaacagacatacaagataaaagcttgtaaaccgtttcctatttaatttgttttggaatggtttttcttgaaaaaaaatgtgtcaaattgtacatttaaagatggatataaaaagtagtatgtatttaaccataacctcatttatctagattctggaattcataaacactcccaaccatagcaaggagagtaaataataccccctaatttggcctcaacacaactgctgtcatactaattggtactttgtgtagctactgccagcttgtagccaatgattacattgtaaaacattacaagaacaatatttttaatgtcttaaattcacatatacatttagcaatattcccatattttagtaacattttgagccaaaatgtttaaaaattgactgggttctttaatccagccaagccatatgttgctttagaggagtgtccaaagtcactttgactcaactgtgttgataaggtaattgcacatatttttaggtttctagctgtaaattgtatagtgtgtatccctaagataataccaattctttctacgggtaataattgtagctactttataaatagctctaatgggccagcataatggctcagcagacagatgcacttgctgccaagactaatgatctgagtttgagccccagatcccacatggcaaaaagagaaaactcccagggttgtcctctgactttcacatatgtattgtttcacatgttcatccacacacgtagacacacactaaataataaatgtggagctggagagatggctcaatggttaagaatgtttactgctcttgcagagtattcaagtttactttccagtaccctgttgggtagttcacaaccacccacaactccagctccaggggatccaacaccctcttctgacctcctagaacggacacccttacacctgtgcaagtgcacacttttgtacaaacatactaataattttttgaaaacctcataaaaatcaatgttaaaatttataaaataaaaaataaatagttcctatgtgtttatggaaggaacattgctaaaagggtttaaatgggcattttaagcatgaattatatttcctctttttttaattagatttatttattttattttgtgtgtgtgagtatttggctacatgcattatgtgatgacctgttgtctggtgcccagagagaacaaaagaaggtatcatatcccaagaactggagttgctggtggttataagccactaaatgggtgctgggaactgagcctgggttctttgcatgagcaacagagcaacaggtgctcttaaccacagatccatctctccacccctgaattgtgtattttttttctcctgagacagcgtttctctgtagctttggagcctgtcctggaactagttctgtagaccaggctcatctcaaactcacaaagatccacctgtctctaccttcaggaattaaagtcatgtgctgctgccgccaccacccagcttctcagtatcctcataaagtagataccagacataaaggaaagtataacaagcctacaatccacaaccccggagaagctagaaccctcttccagaaacagatggaagcagatgcagagatctacaactatccattgggctgagctcctggagtacaatcaaagtgatggaggagcgatatgagcaaaggagtcaagacccaaatggggaaacttacagaatcagctgacctgaactagtaagagatcattgactccacactgacaactgagaaaccagcataggactgaactaggcctcctgaatactggtggcaatgctgtggcttgggctctatagagagataccttgctcagcctagacacaggggtatgggggtgtgttaagggagtaaggggggtggggggcttgtcttgatactgcctcaacaagttggtgggacagacttagttgacttcctaggggaagccttaccctctctgagaagtggatggggggggggatggggcaagaaggagaatgctaggattaaaggtttgtgccagctgctggctttatttttatttttaattcttatgtttgtttcttgagaaagtctcatgtagcccagtgtaagctcacactagctttatagcccagggtggccgtgaattcctgatcctcctgaatctttgcaagtgccagggttataaaaggcagcacgacacttggtttaaagcttctcttcttttcactgttgttctaggaactggaccagggctttctgctacgcaagcaatgtactgctgactgaaaaccagacatttgatggtgttttctaaagctgagaagataaggcaagcatgtaaagcatgcttaacttttcagtccttagggaatgaatgtctgtaatcccagtactcaggaggcagagacagggggatctctgagtttgaggccagcctggtctacagagtaatttccaggacagccaggactacacagagcaaccctgtcctgaaaatccaaaagacaagattccttgcaatggaaagacaaggaaggtaattgcaggcagataaatcttgaggagatggcaatgtgtccctgaaatggttggctcatgcccctgccactagatgctgttgttctttcccaaccttggttaatgacatgagtcttcagaatcaagcctttcatgttgccctgggttctgttactttaaatagccacctaccagattatagtttttatttgtttgaagattgtcagagtctaatattaattttttttccttaacaaaataacaatgaacaagctagaagaatagctattgaaggtagtacaattaacttggcttttctcccagcgtgtttctggcagctgtttttttttttttttttttttttttttttttttttttttaaaaaaatctccttaagaaagaaagggtttattttccaaagggatagagttcatcttcagcggagaaggtatggcatagtgtctggagcaagaaactagctgaacacattttcatccacatataagaagcagagagctctttctggttatttttacttattgtctgaagctgaagttaaaggaagtaatcatggggataatttttggtctttaaagggggaatttctttctttcttttttaaatgtgtatgtgcaggtacccttagaagccaaaggagggtgttagatcccctggacctggaattgcaggttattatgggtcacttgagtgagtgctaggaatcaagctctgggcctctgtccagaactagacagaacagggctgtcaagaactctacattgctgagccacctctgtagacacagttttttaaaaatttagctgactgaacatagaggtatacacctttaatcccaagacttgggagggagagacaggcaaatctctgtgtgttcagggcagcctggtctacatagtgggttacaggatagctaaggctgcatggtgagaaccaagtctcaaaaattttttttcattaaagaattaattaattaaaaattatgagtatgggtgttttgaccacaggtgtgtctgtacctcacatgcatgcagtgcccacaaaggccagaagagtgcgtgggatcttctgggacaggaattacagaagatcatgaattgctgtgtgggtgctgggaactgaacctgagtctctggaaaagcacccagtgcttttaaccattgaaccatttcaccaacccttctaggccctgtccaccaaaaaaaaaaaaaaaaaaaatctcactttgtggcccagggtggcccaaatctcactgcaatcttcctgactgggcctcccaggtatcccaggtactattacaggcataagccatggtgcttggctaggagagatatagaagcaaagacagagtttatatttttcatttaaaaaaaaatgagaccctttctaaaatgcattcattccataaactatcattaaactaaaattactccctagaaatggagccaaaggatggggctattaacacagaggttaaagactgctcagaagcaggctgagataaattaacaccctgaaaattctaatatttcaagcctaattcaataaagggacggtagctaagttgctaaacttaaaataattgcctcatgaatagtcatattgaattgattatgaccgaagagcatgaagatttgtgttttatatttagtctagatgtatgctcttcactaaggaagctgaggataaatttagtgaattgattatctgaaaaagtaaactgtgggcacgaggagagacaagttcttagcctctggaaatgcaaagttaagaagaaaaactgtcttttgcttttgtggcaggggcttatgtattacagactttttttttttttttgcttgtttgcttttggttttatttgtttgagacatgatctcactatgcaatactgtccaactataaatatatagatcaggctggccttgaacttgtgctcattataatgtctctgtttcccagactcagggattactggtagggtacataccagccctagttaatgtagtgttggcaatcaaaggactttgtatgtgctaaaggaacactctaccaggtgagccatattcccatctccttggggggaaaacttaaaggttatgatccttactgggtggttttgtgtgtcagcttgacacaagctggagtattcacaggaagggagtctcagctgaggaaatgtctccttgagatccagctgtaagacattttgtcatttagtgatcaatggggaagggcccagcccagggtgggtggtgccatccctgggctgctggtcctgggttctataagaagatggttgaacaagcaatgggaagcaagccaggaagcagctccccctccatggcctctgggtcagctcctgtttccaggatcctgccctgtttgaattcctgtttcgacttccttcagtgatgaacagcgatgctgaagtgtaagccaaataaaccctttcttccctaacttcttttttaaatcatattttgccacagcaatagaaaccctgcctaagagatggtctgaatgattatgtcctcttgaagttcttacattgaagcctgcccctcaaggtgatcatactgaggaagtgaggcctttagggagtaattttttggagggatggtctctgtagccaaggatgatcatgagcacctgaccctcctcttcccacttcctaaatgttataatcacagaagaatgacactatgccccgccaaggtggattcttcctgaatggaatgagtgctcttacaacagattatcagctatctctttttttttttaattttttttttatttattatgtatacagtgttctgtcggcatgtttgcctgcaagcaagcaagaaggggccaccagatctcattacagatggttgtgagccaccatgtggttgctgggaattgaactcaggacctctggaagagcagacagtgctcttaacatctgagcccctatcagctatctcttaacccatgtgagaacacacccaaaagccacggtataggaacaggaaacagcccttaccagacagaaactcccaggatctagatctcagacatcctatcaccttgagctgggcacccacagttcaaatcactgttagcatcactgtcttctattaattccctattaaagggttgagagagaaataaattctgttgtttataagccataaagtttatggaacagaataacagttaataaacctgaaataataatatactactaaatggggtgactaattacagatgtctctgaattcagagtgggagacaacagataagtgttctgtgattttaaagaaatcgttaaaagagccaggcagtggtggcacacacctttaatcccagcactcacaaggcaaaggcagtctgatcctgtgagcgaaggcctggtctacagagtgagttccaggacaggctccaaagctacacagagaaaccctgtttcaaaaagcaaaacagagggcatagtggctcatacctgtaaacctagcacttggcaggttgaggcaggaggattgcttcctaggctacatagtgaaacactgtttcaacaacaacaggcaggggagtgataatgcaaacttgttgtttcagcaacatgggaggctgatgaaggaggatggcttgaacacaggctttccaggctagcttcgtggacaacatagtaatacacccatctcaaaacgtcaaagtcaaggtggttacaaggttgttacctgctggaggaggccccacgcctcaagccaggccgagttctctctcttcctgtgcgttcagctgtagatagaaccctcagctgcctctccaacaccatgtctgtcagtttactgccatgcttcccagacatgatgataatggactaaacttctgaactgtaagtcagccctaattaaacattttccttcataagaattaccatgaacatgatgtgtcttcacagcaatagaagattgactaagatagatggtaccaggagggaggtattgtgataggcctggccatgcttttgtttggaggattgtaagctttgagattttgaattagaaaggtagttgaaccctttaatagggaattaatagaaaacagtgatgctaacagtgatttgaactgtaggtgcccagctcaagagatttcagaggaaattattagtaagtggcctagagataattctgatattttggtgaagaatgtggatgttttctgcccttgtccaaaaaaaatctttgtaaagctaaattggagagttttggattaacagttttggcaggggagatttcaacagtctagcatttatgcagatctataatgaaaagtaacaagctgattaagggaagaatacaaaatgtacagtttgaagagaaaaggcacaccaggaatagagctaagtggcatggaccaggtgaccattgctgcttgacgaagttccctcctgattacaccaagaacaagaaagttagagatttactagacacacctaatcccaaggatgaaatgcctacaattcagatccagagcctgaggccattaaggggaagaattcagttaatgaatacagagaaaccagaatggtacagtataatgggaagagagtaaggcatcaggatttcaccttttgagagagttatgaaggggggacaggcccatagaataagactaggagattgtagtacagtgtctgctccccagaagtccttgtcccaagggtctccatcctttggtgggggaggggggcgtgaggaaagttcctgattgataaagcagacattctccttatctctggcagaatgaatttaaggcccttcattaacatatgaatggtgcctattgtcaaggtcaatgcaagattcctcaatccctgatctcaagccactccccatctcacatgctccttgcctcccatctccttttaatactatgtgaagctatagagtataaaaactgtagtcttcttttcaattaaacgctgctagcaaccatcctgattcaccttccaatggagtccatctccttctctctctctccccacctactgcacacatccccaaaggggacctgaaacattacctcacccccccccaacccctactaaagcaggtctttggcagctaagtcttgtgctcaaagagataaatggctcgaagaagagcctgatgttaaatgaaataataggagtgatgacctcagagaaaaaccccacttcctcagcccccacccatatatacagctaagcctccaacttgtgaaaaggatttaaagaaaaacttaaactgggtgtggtggctcagacctttaatcctaacacttcagaggcaaaggcaggcagatctctgcttttgaggccagcctagtatacagacttgagttctagaacagctaagcttaaacagtgaaagaaaccgttgaaaacagaaagctggtgaaaatgtgtttgaatgagagggtcatgtttcagccccccaaagcagcaaaatttggcagctttggttatgtggttctggctttggagtcaaggatacaagaaaggggttgtagaatctccctccatggctaaagaaagctgctgagtccaggcatgcatgtgtcaggggtgtcccttcatggaggacgagagaggccattgagtgaagctgtgaagttgaagcctggattgcattggagaccccaagatgttggtgatgccagagttgtgggatacccgctaaggagaactgctattagggtacataaccagtccgagagagaagtgtgttgctgtcaacaaagctgaaaagagatggagatctgaagaacgctctgccattgttgtgcccaaattctgaacccccaaatcaccaagaagcccatttctatgcaaaagcaaagagtcttttattgcagttgtttaaagagctaaccccattagcttggcctttcatctatcatctgcagcggatagttggagaaaagaccccgagaaaccatgaggcaggaatcttatagggcagtgttaggggagtgtctaggggtacacaggctcaggattggtgtgcctccaggcttggagggcttgctctgtgttgattggtcaactggttgttatgacccacaggccctcccagggtggttgctatgctctgcatgtcactgttgtgcacttgttcataaagtacacccagagccttaaagcaaagcgccaccagctaacttctgattggtccttgccacgaggagggcatctgaccttgtattgtgcagggcaggcccagcaaggtcaggtaagcacatgttagcctttcatggctgccaaaacggaagccggacacacacacacacacacacacacacacacacacacacacacaggacacggggactggtcccttcaacatcagacatagagatgcagtttggagtttacacagctgcttttcagtctagctttggtccagtatttcctcactgtgctcccttttctccgttttagaatgaaaattatattctgaatgttggaagtatgtgatctgccttttgatattacatgggatacagataagagattgtcaggactctcagaggagactttgaacttttaaacagtgttgagaatgttatagactatggggactgtcttagggtttttattgctgtgaagagacaccatgaccatggtaacgctcataagtgaaaacatttaattggggtggctcacttacagtttcagaggttcagtccattatcatcaaggcagagagcatggtggcatgcaggcagatatggtgctgctgaaatagctgagagttctataccaccccccacccccagcccagacagggtttctctgctttggaggttgtcctggaattagctcttgtagatcaggctggtctcaaactcacagagaaccgccttcctctgcctcccaagtactgggactaaagacatgcactaccactgccaggctgagagtcctatatattgcaggcaacaagaagtcaactgagacactgagtggtatcctgagcataggaaacctcaaagcccatccacacagtgacacacttcctctaacaaggccatacctactccaacaaagccacacctcctgagagtgccactccctataatatcatggggaccaattacattcaaactaccacagggacttttgaagttggaccgaatgcatttctgcattatgatatggctaagtagaatgtggtggtttgaataagaatgggccccataggttcatagatttgattgcttagaaaccagggagtagcactattaggaggtgtggccttattgaaggaaatatgtcactgggatactcaagccaggcccagtgtcctctctcttcctgtagatccagatgtagaattcttagctatccgtccagcaccatgtctgcctgcatgccaccatgcttcccaactgtagtaatttgaatataattggtccccataagcacaaagaaagtggcactattaggagttgtggcttttttggagtaggtatggctttgttagaggacatgtgctactgtggaggcagactctgaagtctcatatatgctcataccacacctagtgtctcagactacttcctgttacctgcaagtcaggatgtaggactctcagctccttctccagtatcatgtcttcctgcatgctgccatgtcgcaccatgacgataatgtactaagcttaaaaatataagccaccccaactaaacgtctttttcctttataagagttgccatggtcacggtggtgtctcttcacagcaatagaaaccctatgacaccagccatgatgataatgaaccaaacctctgaagtataagccagacccaattaaatgttttcctttgtaagagttgccatggttgtggtatctcttcacagcaatagaaaatggactaagacagctaccaaacatcaagtgatacaggaagaaaccagatgccaggcattagacgaattatttttctaaacctccagcaggtaacaaccttacaggtagatctctgtgttcaaggtcagcatggtatacatagcaagttctagggatccaggactacatagagaaaaccgtctcaaaagaaaagttgtattgtagctagctcagtggttgtgtgcacttgttgctcttgcagaggacctagcttgattcttagcatccacatcagacatctcgcaactccccatagctccagttccaggtgatctgatgccttcttccaggcagtgcacacacatgatatacatacagacaaacatgtagtgatgcattatctatgatttattaaagcttgcctgagaaagtcagccacaagccatagaagccaggcacacacctttaattccagcagccagaaattaggaggtggtggtacacacctttaatcctaggactcaggaagagagatctctctgagttcaaagccacccagggatacataatattgagtcagtctaaaaagagtaacaggtcacacaccttttatctcagtactagaggggtataaaagatagaagcaaggtctcagagaggcattcattctccagccacactgaggagaggcagcagtttgagacttgaagaactcatgtgtggatcagccctttcagcctgagctagaggtaagagctagtggccagctgccttgcttttctaatattcagcttgaagcttgaatcccaatatctgtctctgggtcattgtgtgtgtgtatgttacacaagcaggaatatacatatacacatgataaataaaaacacaatttttttgttgttttgtttttggttttcgagacaggttttctctgtggctttggaggctgtcctggcacttgctcttgtagaccaggctggtcttgaactcacagagatccccctgcctcttcctccctagtgctgggattaaaggtatgtgccacaatggtccagctaaaaacatgattttaattgtattagttagcaggaaagacagctcagtgaatactggcactcgtcaagcttgagggcccgagttagatcctcagaaaccacatagaaggagagcactgactgactcctgataattgtccagtgccttccctgtgctcagtctccagtgcagcaatagtttgttttgatattgttgagttgtatgagttctttaataaaagtcatatatatatatatatatatatcaagcattttaacacctcttcagctgaggatacttgataatagtaaatctataaaacctatataaggtttatatagaaaacgatttaaacaaaatttaaatcagctgttattggcataaattgacccctttcctaaaactataatggggactggtaaatggcttatcaggtaaagacacctgctgccaagtctgactattttattcattccctaagatctacaatggtagaaggaaaaaactgactcatacaaattttactctgatctccacaagcatgcctatacacacacacacacacacacacacacacacacacacacacacactaataataataacaatgaaataccagagaattcacaaaacaaagatgtaataaaaatgtaaaaaactgaactaatgagggatacagttactggtttcccaaatagcctttgttgtgataagatttttctaaaagccaaaatcttggcattggaaaatgtcactccagatttccttgtggaaactggaattgtgacagcttggcatgtttttaagctaattagaggttaaagctgagattactgactcccctgcaggtttgtccattcaggcagcaattgcacaagggaccctaatagaaaggaagtattctaacatggccctggccgtcctggaatgcactatatgaaccaggctggcatcaaactcaggaagatccacctgcctctgcctcttgagtgctgggattagaggtgtgcccaaccacacctggcctttgagagaacttttcttcagtggtgagtcactgacaaagtgcacatgctcctgtagacaaccgctcacccgttgttcttaagcagctctaatgaaatgcacagatcagaaaagtggatcagcaggcaaggagacactgccaccaagcctgactacctgagtttgatccctaggacccacatcatggaaggagagaaccaacgcctgaaaccacatcctctacctctgcaaatgcgagcgtgtgtgaacacacacacacacacacacacacacacactaaatgtcatttaaaaaaatcttttaaattaaacacaaaggaactaattggctcaccaaaagagttaaagacatgaaagcagaagaaggaaggggatcagagggaatgggagggggaaaagggagggaaatagaaggatatgattacaatctgtacatgaagctggcagtggtggcacatgccttttagcccagcactctcgggaggcaaaggcagacagatctctgtgagttcgagacctgcctggtctacaaagtgagttgcaggacagccagggctgtaaaacagagaaaccctgacttgaaacacaaaagcaaaacaacaacaaaagtacatgtatggttataggattataagcattaatgacttagattttttgttttattagtatattatatataataccgaatttatgacatttccacacatgtggtttgtttcttggctagcacacacaataattttctgctgtatttgcttgactagtttagaatctaacattctacaagaagccaccaacaaaaataggagcgcacatccagtaaaatactttttgtgcatacctcgttataacagaagcaataattgtataatagaaaacgttcgtaaccattacagatatcaaagtttattattttcccagtaacaccaacctgctactaccgagattattaacattctttcattcaaaaatgacaggcaaagtgaggccatagtgctgtagatactggaatgataataagccaagatgcataactaaccacatcccccaccccaagtacaacccagctaagaaggtaagagaagtctttacaagggttctagaggattgttgaagagtaagatagaagctaagggtcaattacccagcttgttaatttgccctacccgagagcctctccccctccctctctctccccctctttctttccctctgtgtttgtgtgtctgtctggtctctttctccagatcctcctgcctcagcctcaagagtgcagggatgatagacgggagttaccacgccccgcccaggactaggatcttaaaatgttttaagcatctgcatgtcggtttaagaagatggttcagacgttgtgggaaatgacctcagcgtgctgtctgccttctccaaagctacgttattgtttaggttgggttgggctacatcccctcgggaagacaggattccgnnnnnnnnnnnnnnnnnnnnnnnnnnnnnnnnnnnnnnnnnnnnnnnnnnnnnnnnnnnnnnnnnnnnnnnnnnnnnnnnnnnnnnnnnnnnnnnnnnnnnnnnnnnnnnnnnnnnnnnnnnnnnnnnnnnnnnnnnnnnnnnnnnnnnnnnnnnnnnnnnnnnnnnnnnnnnnnnnnnnnnnnnnnnnnnnnnnnnnnnnnnnnnnnnnnnnnnnnnnnnnnnnnnnnnnnnnnnnnnnnnnnnnnnnnnnnnnnnnnnnnnnnnnnnnnnnnnnnnnnnnnnnnnnnnnnnnnnnnnnnnnnnnnnnnnnnnnnnnnnnnnnnnnnnnnnnnnnnnnnnnnnnnnnnnnnnnnnnnnnnnnnnnnnnnnnnnnnnnnnnnnnnnnnnnnnnnnnnnnnnnnnnnnnnnnnnnnnnnnnnnnnnnnnnnnnnnnnnnnnnnnnnnnnnnnnnnnnnnnnnnnnnnnnnnnnnnnnnnnnnnnnnnnnnnnnnnnnnnnnnnnnnnnnnnnnnnnnnnnnnnnnnnnnnnnnnnnnnnnnnnnnnnnnnnnnnnnnnnnnnnnnnnnnnnnnnnnnnnnnnnnnnnnnnnnnnnnnnnnnnnnnnnnnnnnnnnnnnnnnnnnnnnnnnnnnnnnnnnnnnnnnnnnnnnnnnnnnnnnnnnnnnnnnnnnnnnnnnnnnnnnnnnnnnnnnnnnnnnnnnnnnnnnnnnnnnnnnnnnnnnnnnnnnnnnnnnnnnnnnnnnnnnnnnnnnnnnnnnnnnnnnnnnnnnnnnnnnnnnnnnnnnnnnnnnnnnnnnnnnnnnnnnnnnnnnnnnnnnnnnnnnnnnnnnnnnnnnnnnnnnnnnnnnnnnnnnnnnnnnnnnnnnnnnnnnnnnnnnnnnnnnnnnnnnnnnnnnnnnnnnnnnnnnnnnnnnnnnnnnnnnnnnnnnnnnnnnnnnnnnnnnnnnnnnnnnnnnnnnnnnnnnnnnnnnnnnnnnnnnnnnnnnnnnnnnnnnnnnnnnnnnnnnnnnnnnnnnnnnnnnnnnnnnnnnnnnnnnnnnnnnnnnnnnnnnnnnnnnnnnnnnnnnnnnnnnnnnnnnnnnnnnnnnnnnnnnnnnnnnnnnnnnnnnnnnnnnnnnnnnnnnnnnnnnnnnnnnnnnnnnnnnnnnnnnnnnnnnnnnnnnnnnnnnnnnnnnnnnnnnnnnnnnnnnnnnnnnnnnnnnnnnnnnnnnnnnnnnnnnnnnnnnnttttttttttgcgtaagggtgagacacgtgacacctaccacctgaactttatctgtgtcagtgctcaacacttaggtcatagcctttcagagcatcttctttggatcatagcatgcttcattgattgcaccagtatagatttttttctctctcccattgaggagaggattgggaagactgtattaaataatagatgatagtaaacaaaactgctcagcttttaaaaatacagtcccacgttttagctgagcatctttttattaagacagcttcacagcaagacgtatagttttatttatcgaaaagaggaataatagactaccagccccccccatgtgtaattatgtaatatgctatctcttcaggtaagatttcatgtatgtgttaagaatggcattgttaagggatgtgaagttggggtggggaatgatcagcagagttgttttggagaaagatttctcctgtgttggtaaaagaattctctttcttggaggccttctatgccaagtgactgatgaaagaaaaaagcctgttatttgtccttctctcattgtctactaacacccaaacaacaacaacaacaccttttaaaaaaagtgtgtcctgggactctccagatgtaatgcaaatagcatagaacattttaacataatttaaattttctctcttccttacttttttttctttttgtaacagcaggatgtggtagctcatgcctgtagtgtcaatactttccaggctgaggcaagaggagtggtgtgggtttgaggccaggtgggactacagggtgagataccctgtttcaaaaacaacaaagggcaggggaggtcggagaaacagcgactggggtaaaagctataccaaggaagaaatggctataaacattcgagaaatggcaaaacgtaggcgccagcgcgtgtgcacacacacacacacacaggcacaaagaatttgtgcatttttatttattactttgtgtgtatgccttgtgtgtgtgtgtgtgtgtgtgtgtgtgtgtggttgtgtgtgtgtgtgggtgggtgggacatggtgcatgtgccacaatatacatatggaggactgaggataactttgtagaaccaattcttgcattccacctttatgtgtgttccagcaattgaactcgggtctctagacttgtgcaagtgctcttacacactcagccatcttgggaactctttaatgtgctttcaaaagatggatagatagatagatagatagatagatagatatacatatgtgtgagtgcacacttacatgtacccatgcagaggtgtaggtgtcagcagaggccagaagagcacattagatctcccagagctatagttacaggggcttgtgaggaactgatgttagttctgggaactgaactcatgtcctctggaagatcagcaagtgctcttagcttctgaggcatctcttcatccccctttgacgtgcattttttaaaaaattatatttatatgtgtatgggtgcatgcttgttttctgtggcatgaacatggagatcaaaaacctttaagagtcatttctctccttccaatatgtagagcccagggattgaactcaggtcatcaaatttggtggcgggtgcctttgcctgttgagccttctcattggcttttattataaattctttaggacgacacagctgggcattggtggcacacacctttaatcccaacactctgaaggcagaggcaggcagatctctgtgagtttaagaccagcctgaggtctacaagagctagttctagttccaggatagcctccaaagccacagagaagaaactaaaaaaaataaaaaaataaaaaagtctttgggacacaagttgtgttttcttcttttgtggtaaacatgtaattgacctttctgctcacagtatttggagtgctcaaattatgatgtaattttgcctggttttgattattcaatcgttcaacaaatggatttttaagagcttggtgtagattgtcaagaagcacagggggaacatctgtaaagaaaataaagtccctttcatattggagcttacatactagtgtaaaaaaatagtgacatagatgtcccctttttattttttactcccccccccttctgtactggatattgataatagggcctcatacattctaggcactgaactacatacaaccccacctctttaaaaattttctgttttttagtcagggactcattaagttacccatattggcctgaaacctgcattgtatcccagaaaggccttgaacatgggctcctcctccctcagcccttccccagtagctgagattgtaggctttccataacaggtccagtttctatgtccaaattagtaaagatgtataagaaaaaaatggagcaggaaaatgtcatcagaattgctgttattttatgttattggtggggtcccaccctggaaatgcataggcatgtgctctcatcattgggatacctcagcctttgattttaaatagggggacagcctcacagagaaagtgatatttgaacacagccttgaagaaggtggaaaaagcaagtggaatggactgtccagggcagtggttctcaacaagtgacccccgggtgtcaaaggtccctttctaaggggtcaccaaaagaccatctgcatatcagataacttgcattatgattcataacagtttcaaaattagttatgaagtagtgatgaaaataattttatggtgggggtcgccacaacacgaggaactgcgttaagaggtcacaacattaggaaggttgagaactactagtctaggggaagagcgctataggcagaacaaacagcgagatagcttgaagcagaacagcgattagtttatgtagataactgtaccaggctttgtcttttgagccaccaaccagctcccaaatcgtgacatggaaacttcttattagttatgaatgcttggcctagcctaggcttttatctaccttttgcctcaggctctttacctttctttctatatgttgtacnnnnnnnnnnnnnnnnnnnnnnnnnnnnctgcctggtttctggctccaggcatctctctctttttctccctccttctctgccctcttctctctggttattagatctctcctgcctagctattgcccattcagcttttttattagaccaatcaagtgcattagggagacaaggtggaacagcaacactccttttcataattaaacaaatgccgcataaacaaatgtaatacatccttaaatagttaaatgcagcagaagcaaatgtaacacgtctttacacagttaaagtaatagtccacaacaggaaatagctaggaggccaatgtgagtggagtggccaagatcatagagacagattacgagaaatattacagggcctcaaagacattgctttttactctgagttgggaaggcactgattttttttttttaacagaataattgtatcatctgacacaccttctaaaagaatcactgtctgccagtgagacagctcaggtagaagtggtacttgatgcaaagctgacaacccgagttctatccctgagactcacatagtaggacagaacagatttttacacgttgtcttctaatttccacaggtgtgtgcctgcccgccagcagatgaccacacacacacacacacacacacacacacacacacacacacacacacaaatgtaataggattacaattgttttaaataaaattattattagttatatgtaccactgttttgcctgcatgtatatcagtacaccacatgtgcctggtacccaaggaaacccaagtgggtattggatcccctggaactgggcttatagatggttgtgagctgccatgtaggtgctgggaattgaacctgggacctttggaagagagccgctgctttaaaccactaagccatctctcagccccaataaaccaaaacattaaaaaaaataaaatagatcactgtggctgccaggttacataggtgtgaaggaaaacagtagaagcaggaaacttgttgcatgtttcattatttggcgtaaaaatggtttggggaattggtggtaatgagtcaggtgtgtgtgtgtgtgtgtgtgtgtgtgtgtgtgtgtgtgtgtgtgtgtgagagagagagagagagcgagcatgcatgcatgtgtgtatatgtacatgagcaccatcagaggttattaatgaattgtatgattgtggctgatttctgttttcttttaagatggttatactatgtagcctggaagaccttgaatatgaggcagtcctcgtgcctcatgagcttataagagtgtgtgtgtgtgtgcgcgcgtgcgtaccacagccacttattatgatggagttctattgatttagtagtcagatgaggaacatgatcggttatgactgaaagatttttggcctgaacaattgtaagtttctctgtggaaggaagactaatggagaatcagactcagctttagctcagtttcattttagacatgttaaggttgaagtgcccatttaactttaatggagatgctaaataaataagatatgtctcaggggaaaagtccagactagatataaatttaaagccatgaagccacttgtgtgttgagttaatagaaaagagggggaaacttgatgattgagtcctagggagggggataatccaacaggcacaggtggagagagtgagaaaatacccaaagagattaaataatagtattgacaggaggtgggtgggtaaaggcagtatcatattttcagttaacagtattttccctagagctacatttggagaccaggaagctgtgtattaattagttttctgttgctgtaacaaaaatgccttaggctaggtatgttggtaaaatatgaagtttatttagcttatattcttggaagaggaaagtccaagatccaggtgatcatatggcaaaggcctcataatagcatggcaatggtggatgagtttacaggagagaacacatgattagagaagccagacattcaggttggttagacctgctcttttttaaataataactgactctctcagcaattaaccattgtaaggggtctttctcatcagactttaaactgccaacccccaagtaacgactcggagacttcttattaattatgaaagctttaccttagcttaggcttgttcacaactggctcttttaatttaaattaacctgtttctgttaatctacattctgccacgtggctttttacccctccgccgttgttctgtacatctgactccctctgtgtctcccctagctaattccacacatctagattcatcccctgagttcctctcactgcccagaagttctggctaacctaacctttactgcctagctattggctgttcagctcttattaaaccaatcaggtgccttaggtaggtgaggcaaaacatggacacatattcatacagtgtaaacaaatatcctgcaacaccattccttggataactgaattaatcttttctgagggcaacacctcaatatcctaattacctgccaagaggtctccatcaaagatttcatccattctaaacattgacacactaaagactaagcttccagctagagaaacttttttttgggggggggtgtttgtttgtttgaggcagggtctcctgtagcccaggctgccctctacttcagtgtgtagctcagaatgatctgggaacttcagatcctcctgcctttgcctccaaagtgccagggttataggtgtgaaccaccatccgaggttatattggctttattgattattcgagttctaatcatggcaggtctttagagaggccttctgaagctttactttcctccacacttttttttgttttgttttgttttttgaaacaaggtttccctgtgtagctttggagcctttcctggaatttgctctgtagaccatgctggcttcgaactcagagatccgcctgtctctgtctcctgagtggtgggattaaaggcatgcatcatcaccgcctggctcctggcttaataacccagcttcatttgtcatagcatttagaaggttaatttttaaagatatttttaaatttattttttacatttcagtcctatttccccctccctcctctcctcccattcaccctctttccctcccactgcaactcctatctgctccttggagagggtaagagtgcccctaggaagtccactaagtctatcccatcatctccttgaggcaggatcaaggagatcctgtgtctaggctgagcaaggtatctctccatttagaatgggctccactaaatcagtttttgctttagtgttagatcttggacccactgccagtggcctcatatattgtcccagtcgcaccgttgtcacctatattaagagtctagttcggtcttatgcaggttccccatttgtcagacctgagtcagtgatctgtcactagctcaggtcagctgattttgtgtgtttccccatcatggtcttgactcctttgttcatactatctcttttccctcactttgattgtactccaggagttcagcccaatggttagttgtagatttctgcatctgcttccatctgtttctggaatagtgttctggcttctctgggcttgtggattataggctggatatcttttgctttatgtctggtatccacttatgagagagtacatattaaatttgtctttctgggtctgggttacctcacttaggttggttttttctagtttggtctgtttgagaggctaattttaaaaaaagtgtacattagttttgtggaaagaattatcttactaatttatcagcctgttcttttcttcctgaaatatcatatgataaagttaagcgtgtgtgtgtgtgtgtgtgtgtgtgtgtgtgtgtgtgtgtattttgagacagggtctctctatgtaggcttgactggcctggaactcacagtgtagaccaagctgaccttggaagatggctgaaggggccaaaagtccatggtagcactggctgtcctggaactcactgtgtagtctaggttgacctcgaactcacagggatcctcctgcctccctagtgctgggatcaaaggcgtgcaccccccaccgcccggtgaaattggagcataatgatttatgtttctagtatctctttaattacttaggactagaagagcaaaagatgatttcatctggaaaaccaagacgtgaatcagaattttgaagggtgggagtggggatcaagtaggtatcacacagtgtgtgtttgtgtgtgttgctgaggctggaaaagaaagcattatacattgtgagccattaagtgtcttttgaactcttgtacaacgccccccccccatcatgtgaaagttcccttgttgtaattggactagcatattatttgtaattccacgagaatgaaatctgacttccatcagaggagtctgagcactgggaatttacagatttaagacttaggagtcaatttagcttttggtgagtgttttattttactaaactaattgctcttctctttaagtttaacttaacctttaaggaaatttaaatttaaaaaaaatgtttcctgcctcttatcttgtgtattctttttctttttctttctttttttttttaagattttatttattatgtgtacaacattctgcttccatgtatatctgtacaccagaacacggcaccagatctcataatggatggttgcgagccaccatgtggttgctgggaattgaacttaggacctctggaagagcagtcagtgctcttaacctctgagccatctctccagcccccaagtgtattctttttcttaataaatacactttcatctgtgtttcggtattccagattacctccgggaaaatgtatttggcctaacttttttatgtatttgttcacaagaacaatgtctgtgatttcatagtttataaaacatagacagtggtaccccttgggattatgccattttgcttggttctcacttttgtcagtacttactccttcatggcagccttgtctccaaccttgaaagctatgtgtgccggaatgaaaaatcttatttattgtgactcatttgtaaaccatcttatcttgttcctggtggaagggacaagtaggacacagtgaaaggggagcatatagttagaaattggtagaagatgaatttaaataccacttgttattccacagttctcttttgctcttattggtaactcctcttcatcttgctatacaacattttcagttagaggacaacacatggtacagaaatgcctagacaaactccctagtcctgagatttcttgtaacccctcttattttttttttttttatttactaggattttaaattcaattttgtgtgtttctgtctgaaaggcatttgtgtgggtatccacagagaccacaagaaggcattaggttctccgaggtcgaattacaggcagttgtgggatgcccagtgtgagtgctgggaaccaagcttgggccctccaggagagcagcgtgtgctcctgcctgctaagctgtctctccaagtcaaacatttactgataaatcataaataattttatttgaaaactaactctttggtacacatacaattttaccatctaccaagaatgaaaatacatttgtgtgtactttattgttttgtaaagaattaaattttggcagaatatttgatattgcaagagacagcatcatcactgtttttctgagttgattactattttgattttataattgttagtgctgagaatatgctctattctcagtatgacagaagaatgttattaagagtcatttcagaaactgtaaattttgccttaattttaatcaaaaattctttttttttttttttttttttttttttttttttttttttttnnnnnnnnnnnnnnnnnnnnnnnngctttggagcctgtcctggtactcactctgtagaccaggccttgaactcacagagatccacctgtctttgcctcctcagtgctgggattaaagttgtaaaccaccaccgtccagctcatgtttttttttagagccagagtctcattttgtagatcaggctggtttggaactctaagaagcctctgcttcccaagtgctgggattaaaagggtttttgtttgtctgttttttttctttggtttttcaagacagggtttctctgtagctttagagcctgtcctggaacttgttctgtagaccagactggcctgaaactcacagagatctgcctgcctctgcttcccgagtgctgggattaaagacatatgggattaaagttttgggtcatactgggcttgctggtttatgcttttactctcatcactcaggaggtgtaagcagctggatctctgaattccaggccagctagcattacatagtgagaccctgtctcagaaaattaaaagaaaaaaaagggagggaaaggtatggggggacttgggctgccctgtccatgttatgattttctaaaatggagtttaaaccagcaactcaagcagcagctttttaaaaaaaagacctatattttatgtgtaagaatgtttgcctgcatgtatgaatatatatatgtactgtatacctgactgatggctgtcatttgttttcttatttttggacatggtctcatataacccagggtggccttgaacttggtttgtaggaccttgagctccaggttctcctgcctctatatcccaggtattaagattgcaagactgcaggtctatatcaccaaacacatctttttttttgtttttaaatactttatttaatgtgcattggtgtaaggataccaggtcccctggaactaactggagttacagataggtgtaagctgccatgtgggtgctgggaatagaacctgtgtcctctggaagagtagccactgctcttaaccactgagccatctctccagcccccaccaaacatatcttaatcctctctttctttcttctttcagtactgggaactgagcccacagtctcctgtgtactgggcactaagctacatttccaacccctttttagtttaacttaatgttatgtatatgagtgttttgcatgcttgcatgtctatgtactgcatgtgaaccctggtgcccaaggaggttggaagatggcattggataccctgaaactggagctgcctgggtcctcgggaagaacagtgtcagtgcctcttaactgttgagtcatctctccagccccactccactcgctttgtgagacagggtcctgctatgtagcctgactgtcctgggactcactgtgtagattaggctgggctcgaactcagagttctgcctctgcgatcaaaggccttcaccaccatgcctggtttcaactccccatttttaattttcagttttgagacaggttctcacaagttgaccagagtgggctgcaactaacttggtaacccagttaggccttgaatttgtgatcctcctgccccagctagctgaattacaagtctgtatcaccaggttcagatccattatctttctataagagcagaaaactggggctggagagatggctcagaggttaagagcacctagctgttcttccaggtcctgagttcagttcccagcaaccacattgcggctcacaaccatctataatgacatctagtaccatcttctggtctgctggcaggcatgcagtcagaacactgtatacataataaataaatacatctttttttaaaaggagcaaaaaactttatatgcccagtaaaaaccatcataattcatatatacagtagtcttgactgtgagtgaagttgtttgagataatgtttattggtgtcttgtggcaagacatcttgcacattgcaaaaatgtacttgtattcagaacaaaggctacaatgaaattgtataatagagccaataacacttggattccttatgcatttgatttttaatgaatttttagttcttgcctgttgataatccttttagtgtttagttacccattttctgtgatcctccccacttctgttaagtgacttctgaaagtgttatgacttaaaacttaagtagcagagcctagagtaacaaaagttgtaattgattgctagaggaggcagagtcagttgtacagactgagtcaagagactgcacagtcagccaggcattggtgacgcacacctttaatcccagcactagggaggcagaagcaggaggatctctgtgagttcgaggccagcctggtctccagagtgagtgccaggataggctccaaagctacaccgagaaaccctgtctcgaaaaaaacaaacaaaaaaaaaaaaagagagagagagagagagagactgcacagtttcttgtacagttactcagtctgtttactgaaagtttaacaaaattatgttttctcttgaacataaatgtaattcaagcaggaataaaaaattggcatcttctgaatgtggacatggctgttaaatagacatgccttgttgaatcattaggagacgaaggccttgaaatgacatatctcttgatatgtatatgtacataagtatttatttttgtgccttttggaagagatgacaactttttcctgaaagcctttgaggaacaactgaggctctagtgtgtgtttgagagattattcaagtacaggtgaaaagtaattttaatttccttgctcttaataagtctttaatattaaagctgcattgagacttaaagtacaaatgattgtattgcttttgtaaatccaactgcatagcctttaatgccagtaaaataatgagatggtccactctcaagtgtgggaactactctgcacgccattcccctgtcccctgacctttgccttttaaccctgttgctttgtaatgagattatgggcctttaaggctgtctccagtttgctcaggtttccttgcacaacataaagttttaggcttccttgaaaagctgtttttagaattgaagaaacaacttagatttaagtgtggctatgacttttgtaaacagtttttcttttaagaagttttcttccttaatgtccaaaatatcatatttctaatagtgactttagtttgtttttgttagtgtatgacttaatatgccctctccctttatttaataaaatgttcttggaaagtttcataaaataaaattgcttatttagacagaagctaaaattgagctttctggggcacggagctcagaagaaaccctgcacagcttattcccatagttgtccctgtaggcagggggagttagcatggatcaaaaggggatcacacatgactagcaattgcttatggtcaaagaaaaccactgctttaatctttctataataagcaagttgtactttatcagttgttgaaaataaaggaagaggaaaagagataacttgttagtaatagagtgctacttgttacttgttattaataagttgcttttgggggaaagggtaaagttagtgacaaaagagtttggggccgatgcctcatgacctaagtcccgtcccctggttgaaagatgaaaggtgagaaccaactctacagagttgtcctctagcctccacaggtacctcatcatgcacacacaacaacagtaataatagtaataaaagggtttcagctcagcaggtgaagcccttgcttccaggcctaatgacctgagttcaatcccaagacctatatggtaggagggaactgaagcaaatcctgaaagttgtcctctgacctccacaagtgccttggcattgatatccctcccccatcaataaatgtaataaatagaaaattaaaaagcagtaagagtttgaggattctctgtgttttgttcttttgtatcctatcttggggttatttagaaaactgaacatgtgtttgtttcagctatttgcttccctttctttgttgttgttggagagggtctcttacatgtagcccatgctggcctcagatagctaaggagatgactgaactcctggtctgcttgcctggattacaagagtgtgccaccatgtccagtatgttccagtaattttaacagtactttctgaggagtgtctgttttaaataccacctgacagaaaatgaagctgttagacgttggttctcatggcactttcttattctgccaagagaaaagataaataaaatgattggtttgagataacaaagggcagtaagtgctttttttttatttttaaagaattgtggatttttactagtaacaggaacaacacactcaagtttaaaactaaagtgtgtacaagaatgccttcgggaaataactgccacctgttattccacagagacagaatgtgacataaaaatagaacttctcatttccggtttttaactagaagccagagtgactagtttattgttaagtaagctgggcattaatcaggaaaacctagtaagattttaaaaattattttagaagattttatacctgcatatattatatgttaagcatagtcctgctgagttccctctgtcctctccctattttgtcctgttccttactattaggcccctttgtccctcagatgatttacttctcttttctttttctttttttggccgaggggggtttggtttggtttggtttggatttttgagatatggtctctctgtgtagccctggctgttgtggaacttgctatatacctggcagacctgggactcacagagatccccctgctgttctctctagggtgtgagagttaaaggcatgtaccaccatacctggcccttccttctgttttcatgtgagataaatatattgttttatgtatctatattaaaatctaggaatgacaaatgagagaaaatacaatgtctgtcttttttaaattggcctaggtcatttaattataataatttctagttgcatcagcaaaagattttgttcaaattattactatttaatttggcatatgacatttgtaaagaactcaatatgtagttgttgactcagagaatatggagttctcggttgtttactttgggagaaatcaaaaccttggcacttgcgacacattttttttttcctgttagaattcctccataccatcagtaattaaaatacagggggaaaaggaagaacaactttgagtctcaggagtttaatactaaaataatctactctttagtttttttttttttttctgtaatggaaaggagaaaggaaaacactaatgataaattaaatgggaagacagaaaagcttactaagcagaatgtagtaatattttgtttgtaatttaacaaataaagcttgcctgaatatcaaagtgcagagctaagctactagttagccatagaggtcaggcagtggtggccacacctttaatcccagcactcaggagacagaggcagggccaccctgggctacatgagagtgaatcagtctaaaaaagaaatggagctcatacctgtgatctcagcgctagagaggaatataaggcaggatctcagtgcagtctcattgtagtctgaggtttggtggagaacattgcagtctgtagtcacaacaaggacaggatcggcccccaacccccccattagagatgactgagccttggtagaggtgagaactctccagtggttggctgctttgcttttctgatcttcagcttgaaccccaatatctgtctctggctttttattatttgtgctacagcagaagaggcaattaagtgtgaagatttatttgttgtcacacaacacaaccataatgtatttaaatgttataagaaacttctgaggaatgcttgactgtctcctgtcttacaggttgcttttagacaatggttagggaggctggatcatctggcaactgctgcaaatctgtcatagcttcatcctaactcacaagatgggattatataaacattcacaatcagtgttgggcactaactctagaatgaagagaatgtctgcagtttccctttacgtgtagcaggaataagatcagagacgatgttttgccttttttttttttggctgttggtgattttaaaattctcagatcatattgttataaggaagttctgatttttgatcccttctgtgatatgagtttcagatgaaaaaaaagcaaaacaaagccatacaattttgtatgctaacctagaaatttaatttaaagacattcagaactaatctagagtttacaaaggttcatttgtcatacgtagtaaacttaagcaaaggtagatgtttatcattttccataaacctgtcagttcagtttactgaaaattaatggaatttaaaaaatacttaatctgtttaatgagtgtgggtattttgcctgcatgtgtgtctgcataccacttgcatgcctgaaccctggaactggagttagagatgactgtgacctgccatgtgtgtgcggagactccagcctggatcctctggaagagtagccaatgcgcacaaccactgagccatctctccagctctggaggacttttttgaaggcagggacctactttgtagccctggttagcctggaactcattatgtagacctgactattctcaaactcatagagatttgcctgcctctgccttcagagtgcaaggattcagtatgtacaccatcacacctggttctgaatatgatttgaattagtgtagcaatgcctactagggtttgtcagtttacttatttattttgagtaaatgaagcagaactcctggaattaaaaagtacattaataacgagggggatgcacaaactgacttagtggagcccattctatatggagagatactctgcccagcctagacacaagggtgggctggagaggggccttggtcctgcctcaaccagatggtggcacagacttagtagacttcctaggggaggcctcaccctctccaaggagtagatgggatgtggtggggaattgggaagagggagaagagggggggggaactgggattggaatttaaataataataataaaaaaagaaaacatttaaaagcaaaaaaaaaaaacccaaccacaagccacaccaaacaaacaaacaaacaaacaaaaaaagaacaaaggggagctggacataaataatctcaggccttggcgggtttgaggtaggaagctcaagaggtcaaaaccagctctatcacataatgattttggagccagactgcttatgtgagacactgtctcagaagaaataaattggagagagaggggaagggaaagagaaaatgaacaaacacagagtggttagcttctaattagagaggtaatatttgcattttttttttttctgagagtaactccacatgagagattttgggtttcagctgatatagacacagtggtttgtgtaaggaaggaacacaaataagttagtttcagatggtgcatattgaagtcaattttggttttgcgatagtgacgctggtagtaataacagacaccttttaagttttttttcccctcttttaatatttttcctcccttcgtaacagtgagaattagggtcattttctccacatttgtcttgatagtattggtagacctagaatttgattttttaagatgtatttatttattttatgtgcacatgtggttttgcctgcatgtatgtatatgtaccatgtttgtgttgtgtttggtgcccaaggaggctagaaaagagcactgggccccctggatctggggttacagatggttgttaaaatgtcacatgggtgctgagaacggaacatgatgtttcacaagagcatccattcagtgctcttaatactgagtcatctctccagaccctagagttttattttaattaaaaacttgtttgttttttgagacagtcttactgtgtagccctggctggcctgaaactcaatgtagaccagtctggccttgaactcacagaaacgtgctttcatctgcttccctagcacttagattaaagacaagcaccaccaggcctggtgaaaatttgattttaaagttcagacccagataatttctagtggtttttcccttttgtcacacctacctatatgcattttaaatttttctttcctcttctcttttccttccttttttgttaaggaaacacagaatatatacatactcatttatgtctgctttgaagatggagcataaagataacatacttaaattatgttagtacaggctgagacttactttttgagttaaagaaaagcatattaattattaattagtaaatatttgtctgttttgttttgcaaagcttcagtttgcagttagagtgcacagctgtttttatggcagaccttaaaatagtttgttgtttggaatacatctgtgttctgggtccataagtcagggaaccatatgatttttaatggtgagtttatataacatacccgtctataactagttcaaacagtgtcagatgcttgcactgacatttctaatgcctagatctcgggaactactctaggaaaatgtctaccagttatctgagtggaagaatttgattaaatacttgctgttggttggtaatgcaggaatagtgtttagtatggagttgagtgggatataattcctcataaaaagctatatgttcttggaactcttgtgtagacatccagaagtaagttcctaaggttgtgaccactttactgacagcttttgtgtgtgtgtgtgtgtgtgtgtgtgtgtgtgtgtgtgtgcagtgtgattgtgttcaagtgttgaagtcaaaggataactttctggagtcagtcctttctttctaccatataagtgagggattgaactctggctgttttactaggcagcccaggcatgatgaaatatgaccataatcaaagcactcagaagacgaaggctgtaggattttgagttctaggctagcctgggctactcggtaacttcaaagcaaaacaaatctcatatctgcctctggccatttacttatttccttcagaagtagttaatcacatttttgtttattgtttatattgccatgggtatttttttttccagacagggtttctcaatatagctttggagcctatctggcacttgctctgtcgaccaggctggcctcgaactcacagagatccgcctgcctctgcctcccgagtgctgggattaaaggtgtgcgccacaaacaccccgcctgccatgagtatttttatatactgtgacatattattaatcttaaatgtatctccctagccaaaactcaaaagttttgttttcagaaagagttttttcattttttgtttctttcttcttttttttttttttttttttttttttttttttttcaaggcagggtttctcggtaggtttggagactgtactggaactctctttgaagaccaggctggcctcgaactcacagagatccgcctgcctctgtctcccgaatgctgggattacaggtgtgcaccaccactgcccggctcagaaagagtttttatttctaaaatctctcacaaacttttagtgaatggctataataacctccacatttttactaggttttctgtggcccgtagggtctggccatcagcagactagggcagagaggtacactagggtagctctgccttgctgctggtgctggtgacaacttgcttcagtttatttcatctacagtgatcttgtcctccaggtcccagatcttgatactggagcctgtggcaggacagagccagtagcagttgagtctaaaagcacaaggcaacagcgtatgtagcctggcctcctcccctccaaaagcacagaaggatctgtctggacagaccatgtgaacttttttttaaagtaagtctcatacggcccaggagcagtcaaggagccttagttttatgcagtactggctggtggatctgagtctttgtgcaatgctaggcagtttatctaccagcttcgatagtccccagccctgtttttaaggcttctagagttaggttaattatgtagatgttgagaaaccaaccagttactgaaagtggattattccgttttttttttaaaatctagaaatcagctgggtggtggtggcgcacgcctttagtcccagcacttgggaggcagaggcaggtggatctctgtgagtttgagaccagcctggtctacaagagctagttccaggacaggctcaaaaataaaataaaataaacacaaaacaaacaaacaaacaaacaaacaaaaactactcaataaaatctagaaatcttaggatgttctttcttttaacatctgtactataaataaacttgccatctggatgcactggtgtatgcctgtcattgaagtactctgaggatgacggatccctctgagttcacagccagcctgggtcacagagtaagacattctctgaaaagaaaaaaaaaggcaaaacaaaaacaaaaaacaaaaaacaaaaaacccttaaacttgtcagtagggctgctttcttttattagcttattaccttgtcagattactccagaatttaacactctccaatgtatgctgtagatagatatagttgagtggtacaacgtgtgcctagcatgaatgaagtgtggggttcattcctgagcgtcagaccagcccacctgcaaaatcttttctgtttccccttcccaggggacccctgcatccccccacttgacctagttaggcttctcatgtccacttttgcttctgtaaagacatctggagtctcaagttctaaaaagcaattaggcgtgaggtttttgtttgattttatagtttatgatgatcttgaaagaaaagtgatggtagttttggtctttaaaaataaaaaggagaaagattaggatagtgtgcagggggagggggagacactggaaagtgcttgatgaattatgtaaggaaagcatttggctttggtcagaagtttagttgcagtcggctgcaagtgaacccatctggcatactttttcattattctcctgaaatattcatgggctcccacagtccctgccttgtttccattggattcatacacactctcatcttcccaagactgctgtgggtttgcagtaggttgtcctcgttttgtttccatgttgttttggatataatcnnnnnnnnnnnnnnnnnaggaaaagtttagatgcctatgggcgtggaacaaagtaaactacatgtattttgagaatgggaaacaatgaccaaagtaatcaccatagtttattatactttaaggtatgtgtaatacttagatatctctagatgaatctcttctgaccattaaatagcactccttttcactggtagtccctagcactacaagaaaagaatatataaataataataaatctggcccttagtgagtaaatctgtggtttaaaaaatacatactttttatctgtggacaattagccatttatatttgtcacttaggcttctggcaataaggaagtagggctgtccaggtgtattaatttatttcttttcttttccttttttttttttttttttttttttttttttttaaaaggggttttttttttttttttttggtttttcaagacagggtttctctgtggctttggaagctgtcctagaactagctcttgtagatcaggcaggttttgaactcagagatccgcctgactctgcctcccgagttctaggactaaaggtgtgtttcatcaccgcctggcaatttatttctaaatacttttaaaatattttatttatgtgtctctgtgtgggtatatgtacataggtgcaagcattcacagaggtcagaagtgggtgtcagatcctctggaactgaagttacaaataattcagagccaaactcagatcctctggaaaagtaatacaggatcttaaccactgagccatctcttcagccctctgtgtttctaccttctaaacctgaaaccatctaaaataaacagtttagcataatagttgtaaacttgggttctgggtttggcatggtcaaaatagatctgagaaccaagtcttgtagtggagtggaattttctacttcaggtcatgcttatactgatacagggaaagcatcaggcaacctagagaccaagcataaggtctgtgactatggactcacctttacctaaaagtggaatacagacaatactcttgggacagaagtctcttgggagaataagttggcggaagggttaaaactgactcttgataccatatttgtaccaaatacaggaaagaagagcgggaaattaaaggcctcatttagacgggattgttttagtctcggcagtaatgttgatatagatttttctggaccgaccatctatggctgggctgtgttggcctttgaaggttggcttgctggctgtcagaagagttttgacacagccaaatccaaactgtctcagaataattttgctcttggttacaaggctgaagacttccaactgcatactcatgtgaatgacggtactggatttggagactcaatctaccaaaaagttaatgagaagactgaaacatcaataaacctggcatggacagctggcagcagcaacactctgttttggcatcgatgctaaatataagctggattgtaaaacttcgctctctgccaaagtaaacaatgccagtttaattggacggggttatatactcctctgaccaggagtcaaattgaccctgtcagctttaatagatggaaagaacttcaatgcaggaggtcacaaggttggattgggatttgaactggaagcttaatgtgcttttgagaagaacatcatttgcccctggaagtgaagaaaaatgaacccactgtgttttggccttaaaattctgtgaaatttcaaacgtgtgaacttttattcttccaaagaattgtaatccttcccacactgaagtctagagattgcaaatccatcctaagagaggtccttgaaggtatgcctgcagattgtcatgtttgtgccacatttcagttgagttctgcagtgttagtttaaacatgttcctcagtaacaaggtagtgccatattaaggaaaatgatctgacaccccggtttgaacatcacgtcctgcatgtcacactccacttttccatgaccttttgttatatcagtttctgctgtagtgaaatctttggttttgcatcagagtgaaataaacccgtcacatttgtaacataaacaacaacaaaaaagaccctttcggttgtaaacttgagggaaacttggccctgatataggtgccagttttctcttcttaatctaggagtagctgcaggtggaactggtaatggatttggcactttgtaaatctgtattgaatcaacagacttcctgggcattgaaccttgatttcctgactcagaactgctaaaaactgtggcttgatgatgtagacagacccatatggaaaagacttttaaaaatagcttttcatgccttattcccaccccagccatctttacctgtttacaccaaagtagcctatggggtgtgatagctacttcttttgtcattgtcatgtcgtttggggtagagaggatggatctgaggaagccagtaattcaagtcttaattcctcttgttatttgtaggtttcttgttatttcactgcaccaaagtatgaaatagctttctggaactccggacatgagcaaggcagagtttttgtcattgtgtcacctggtaacaacattagagatgtaaactggacttctgttgcatttgtcagcactgtttattttttaatagtctcataggtacattttagagttcctgttttgtgtggaattacatcttttccttcaaacgctgttatcaacatcacgtaaaaaaacttgaataaaatattgagacctaaaaagatgagatcagtagaggaaaaaacatgaggttgctatctgacctccacatacatacacctgtgcatacagctaatacacacacacacacacacacacacacacacacacacacacagacacacactcacacacagagcacagaatatttgcatgaaattggatactaatttttacaaataaattatttctacagtaaatccccaagtagtatgtgaaaaagattggacagaaaaaaaaaagcttattcaaaatagttaattttgttatagttgtttttttgttttagttatcctatgtagccttggctgtcctggaactagctctgtagaccaggctggtctcgaactcacagagatccacctgcctctgcctcccgagtgctgggactaaaggtgtgtaccaccaccactggctattcccttatctttatagagtgtgcaaaggtccacaagtcatggtgtgtaagtgtaagtcagaggacagcttgtgcaagtctgttctagtcttccatggttttttcatggagtatcttgttttctccatctataatgattgaaagctttgctgggtatagtaatctgggttggcatctttggtcccttagtattaatagaatatatatccaggtccttctggtttttagaatttccacggagtggtgaggtgtaattctgatagggatgccttcacatgttacttagcccttttctttgctgctcttaatattctttctttattctgtatgttttttgtttttatttttatgtggtgggcctagccagccagcaggacgtaagtagaaaatgggggttcacatgtgtgtccctcactcttaaaccttcctcacttcaccctgaccacccccaattggtcatggccaggcacatatgtaaccagcccctaggcaggcatggttagggtgtcccctacaattccccttttagtctaaagaggattaaaacttaacagtgttaaatatccataattaaaaatcacgaggataaaatacaggaagatataataatctgcttatgccacatcctaactatgtctattctatttcaactaaaccttaaagtcatgtgaaagtggtatccaagcctgaacacctcctttctataccaaccataaacaataggaaactagccctaactacgtgtacagcaccagatcttgtaacatatggttgtgagccaccatgtggttgctgggaattgaactcaggacctctggaagagcagtcggtgctcttaatctctgagccatctctccagctnnnnnnnnnnnnnnnnnnnnnnnnnnnnnnnnnnnnnnnnnnnnnnnnnnnnnnnnnnnnnnnnnnnnnnnnnnnnnnnnnnnnnnnnnnnnnnnnnnnnnnnnnnnnnnnnnnnnnnnnnnnnnnnnnnnnnnnnnnnnnnnnnnnnnnnnnnnnnnnnnnnnnnnnnnnnnnnnnnnnnnnnnnnnnnnnnnnnnnnnnnnnnnnnnnnnnnnnnnnnnnnnnnnnngtggtgtcatattgggttttctgttgttgaatgtgcttttaccttgtcctcttctcatcctttcttctagtggatgtagcaagtgttttttgttatcctggtgggtgtgggaccaaggttcccttctgatgtcggtcctcttctcgtagatggaggtgtcactgtttcccgggtgtcagcagtgccgggtcccgctgaggtagttggaggcagagctgtcacccggcctcagggtgtcggatcccgctgccgaactctgtctggcatgcgggtcgcttgcctcagatgactctgagcagcgacaatgaacaggagccggaaacagcccctggcctccctgggccagtggatggaagccaggctacctctgggtgttcagtgttcggaacccaccgctgccgaacacggtccggcacttgcctcagatcactctccttttacagaatcttaatggcctagaagttactaatgatggatattaaggtaatagcattgaaagattgacttattttattctcattcaaaatgtgtcataaagagctgggcgttggtggcacacgcctttattaatcccagcacttgggaggcagccacaggcgggatctgtgtgagttcgagaccagcctggtctacaagagctagttccaggacagcctccaaagccacagagaaaccctgtcttgaaaaacaaaaaacaaaaacaaaacaaaacaaaaaatatgtcataaagtgattgtaatatactggcagttacaggctgaactcagcatgtgagtaaggggaacaaaacctcacaaaatacttgataatttgattttgaggaattttgttgtcaacagagggtttggggtcttttttgttttgtttgttttttgaaatagggtcttgccatggatcccagactggcctcagaaacatcacccttctgcctcagcctcctaggtgtaatacttgtgtggttctttaacatactttgtagacagagttgcttgtgttcatctactttggatcttatggagtttgtcttctgtgtctggtgcttcagagtcatcccatagaaaagctgtactgtttgaactgaaggatggccagtaaagcgtgcagtgtttttaacttcagacagtagctcggtagttatgcatgtagatttattactatttctttcccttgtgctaccttcagaagttagtaacacgtcctgaccagtcccctgtattcagaaagaagcacaatacatttggtgtatctattttctcctactaaccttctgacacgggtttaatgctgattagtccccaaagaattctagatccaggctccatggcaggataaagaataatcgttggtttgcacacgggccagacgcaggtgttgagtccagaatatgtcacatgaagatcatattttgtttaccaagatgaggttaaattagcatagcatgaactggagagaagaaagggtagagtgaggtagagaggagcaggctataccagtcagttaggatgccaaagtatctaatggcattgaaaggttgactgaataccttattcaggtgagctttaagtcactttgcattgggaagataatatatagtcctaaaggctcaattaaaagtcacatgaaagatgtgcttgctaataattatggtaaaaatgatgtttgaataatacttcgaaactcagagatgccattttagatactcctcttgtatgtgcctctcactcagttctgggtctgacataggtgtaaggtgggcatttaatggagtagaactctgtctttgggtttctggaagtttcatccaaaccatacttgaagacccaggctcctaactcctacacacaaggctgagttgagggatgggaaccctgtttggattttcttagtttttgagtgaagttgtgtttagaggatcaaattgtcctattttgcatttaatggtcacatgtttcaaagctcctcttgactatggtattttctcaggctttgttgtctctggtagtttttttaggctgcttaccagatatatgagcccttttggaatgtgatattttgctcatgagagtagagttctggggttgtgtgtcaaaagcatgtttgatcttactaaactgtctttcacactgtcagttctgagagttcttggcatttggcatccttagcattttgggatactaactttagggccacacccattccagttggtcaggatacaattcttacaagtcatttagttttatcatcattttgtttcctttgtctgagtattcctcttgaaattagtcttaagatgtatgtgctttccctctatacttgtaagtgttgcagatgtctaagtagtagttattatgttaaaatcacttatgttctttgcttgtaaactacatgtcactgaagttaagctgtgggtctgacctgaatgtttcaaatttaattgcttttgtttaattttttgtcttcattttccattcctcagtatcatttttgttttttgtttgtttttgctttgttcataaagatttttgtttctattacattatgtagttttgtaccaatggctagaagcagatcgtcatggcaagagccaagatactgcaaatacgacttcaggtaaaatagtttaaaaatgaatggggtattagaaatcacaattttaattcaccccacgtcccattgtgaatgcttcttaaatttgcttagacaaaattataggtgatagttgttttttgttctctcatctgcatcttaattttcataaagacctcactttgctttaagccttgaaaaaaatatatttactagtctaagctgtcttggcatgtatttcctatttccttaggaggaaaggcttagttaaagtttaaatttagtagatcatttggcaatattgtttgaaattagtcctgtatatagtttataagagacaatattaacattgtagctatcttttggcaatggtaaaaaatttaacataggttccttacaagtatataaatacttgaagaaatttgcattccttatttatttcaagactatattaaaaaggtaaattttaatttaaggatgtttatatacagtttctatttcatttgaatccaaaatctcaagcccagtcattttttcctatgaacttttttcttctcccactgatgttagtaagactagaataactacatttattcattcctgaatccttaccagtgatatcagactctttccctaatttctttcaaaataatatttgccaagacagctgtacatatagcagtgatctttcttgttgctcttctttctttctttcttttttcttttttaacagtataagagaaattggtgctggtgctgctagtagctgtggtggtgatagttacgggtggtggaggtgttaataaacggtgcaagtatcggtggcagtggtggtggcggtggtggtggtggtgaaaggaggagaaggaagaggagggggagaatacgtgtgactgtttatgtgctttgtatttttttttttaattctttatggggcataaattggttgtgacttcagattgttggtggttccacaggcaacagaacaattatattaaaaataaaactgttggccaggtgtggtggcgcacgcctttaatcccagcacttgggaggcagaggcaggcggatctctgcgtttgaggccagcctggtctatgagagccagagctgttacagacaggaaccctgtctcgaacaagaaaaaaaagaaagaaactgttatgacttctcctatttatcttctgtcccatttataacttgatatctgaatgaagatgttactattttaaccatgcacaggcaggaattcattaaaaggtaagtattacaagtagttatatcatgggttatattctgtttctgtttttttggttcttgtggtattttcttacagttatggataaaaataggcatttcagggtcttagattgtgggccaaagagagggtttctatagctttgcattatctcatgataaactttttgctgtgacaatagctgtcagtaacataggggtttttgtttgtttgtttgttttttgaaacagggtctctctatttagccctggctatcctcaagctggttctgtagaccaggttggccttgaggtcacagagatccacctgcctctgccttcccagtgctgggattaaaggtgggcactagcttgctcagctgagtagtatagatttttagaccagaggacctttttcctggctacctatttatttatagaccaaaagtgaagtgaaaactagtctttttcaaaccaagaaaatataaaatatcttgatgttcacaaacaaacaactagtacagcttaagaacatcatttatccagaagtcaacaattttgaatcctgaattctgtgttcctcagtcgtactgactcatggttaacatttatctcctcaacctttagtcattaggcaatctaggagcaaggtttaaaaattggtgaatttactaagaaagcatttatttatttaaaaatttatttaatatgtataccgtgttctgcctgcatatatgtctataggctagaagagggcaacagatctcatcacagatggttgtgagccaccatgtggttcctgggaattgaactcaggtcctctggaaaagcagacagtacttttaactgctgagacatccctccagctcccagagagcatttatttatttgtctgtctatttattgagaaagaactcaactgtagcccaggctggcctggaattcactatgtagcccaagttggcctagtattcacagtgatcttcatgcctctgcctctcaacggctggaattatagacatgagaaaccacatctagttttggggtgcctttgacagtttctctcctggaagtagaagctctcaactcttagactgtgatgtattatttatgacttattaaagcttgactgaagatttagacaagcaaagtcagcctgaagttgtagagatcaggcagtggtaatgcacacctttaatcccatcaggcagaagctaggaggttgtggtacacacctttaatcctgggagctggtacatggagcagccctttcaacctgaaatttgaacccctgtatcagtctctgggtcatttatttttgtgttacactacatacatacataatacttgactaataaaaaaaaaaaagagactccaaaggaaaatgaccatttgttaaggacttcagttagaagccgtagtttagttgttttcagcaaatacatttaaattatgtgctttattcataaaagttcctgtatatttaacattgtcgtttccaataagatatcagtgtataacatttcccttgtgtgattttttttttttttttactcacacaactcaaagctgttttagtatcttatcttttcatatttttatcccaagtggacactgagtcatgtctagcaaggtatcagtgccacttctaagtccgattgatttgtgattctttaattgtacaaatactagtaaattacatttatatctttccataactgtagtttgtacttaattagaactaaaaagtagaaggcatccattctttaatcccagcattcaggaggcaaagataggtgaatctctatgagctccaggacagccagaactgataatagtctcaaaaggaccaaagaaaagaaaaggaaagaaaagaaaagaaaacaacagggaataatgaaattcctttgaggtcttctaattcctgaatactaacttttttacattgactgtttaagatccatctaaatcaagctattttatgaaactaagctatttggggtaatagtcttatggaaattaatttggtcaaggaaataaacaaatctgattaccctatgatttttttcatgggggatggtggttcgagacagggtttctctatgtagccttggcaatccaggaacttactctgtagaccaggctggccttgaactcagagattcatctgcctctgcctctcaggtactggaattaaaggtgtgtgccacctctgtctacagttacctttctagaaatttgataggtgttgacttgggtatagaatacttatttctttaaaaggttaacgtgtttagtgtattttacccattgtttctgattttgttgattcaatcactgaaaacctgtctgtcagacacttttgtggcaacttaaacaaaattgcatgcctgcactgcagcattgggtttgtgggaaaatttcagtatcataaccttcagcttaaatcaaggtgtttcttcggtgaaacgtttctatataacttatcactgtatgttgaaatgagtataataattacatgcaccaatgatatttgtgtattttgacttttagtgttaaatacagctgtgattttaaaattcagattctaatgtttttaagtacagacttctttctttttttttttgactgtttttcttttctttttctttctttctttttttccttttagttttttgagacagggtttctctgtgtagctttggagcctgtcctggaactcactctgtagaccaggttggcctcaaattcacagagagccacctgcctctgcctcctgactgcagactttttaattgatagttctccagttggtaagtatttttcaaataagtttgagaaatataatcagtaaatgtttttttaagatatacctgtatattatccaggtgtggtgccatacacctttgatcccagcactcaggaggcagaggcaggcagatttctgagtttgaggacagtctggtctatagagcaagttccaggaccgtcagagctacacagagaaattctgtcttgaaaataataatagttatatagagtagatatttttaattattatatctttttcaattccaggtattcattgattattaattatttgttgtaggtgaaaattttgaccagagtcctttgagaagaacgttcaaatctaaagttctggcacactaccctcagaacatagaactcaacccttttgatcaagatgcagtgaacatggtatatatttttccttttctgtcctgtttcttcagcatttcttttattaggatataaatgataaatgtctattatttaatacaactaatcctttaaattctatgagaaatagtatttttaaggtttcattttttaaatgtctgtatccatcttttgtatgatacatgtgtatgagtgcctacagaagccagaacagggcatcagtgttattgttttgtttaaaaagaagaaaagaggaattgctgagaaagacatattgactataagtttattataagggccggcagaatggggagactaagaagaggaacagagtaatggctgaccgccctggccgggcgccatagagagacagagcggggaaacagagagacgggagagcacacacagagagagagagacgggggagagagagagagcgtaaaggggaaggggcctatcttttaaaggggtcctctgcatggaaccttgggctgaccagggtattgcctgagtggattccaccaggtaacaggggcaggccagcataatgcctgaacctttcattcccacctctacttattattaaaaaaaggtgnnnnnnnnnnnnnnnnnnnnnnnnnnnnnnnnnnnnnnnnnnnnnnnnnnnnnnnnnnnnnnnnnnnnnnnnnnnnnnnnnnnnnnnnnnnnnnnnnnnnnnnnnnnnnnnnnnnnnnnnnnnnnnnnnnnnnnnnnnnnnnnnnnnnnnnnnnnnnnnnnnnnnnnnnnnnnnnnnnnnnnnnnnnnnnnnnnnnnnnnnnnnnnnnnnnnnnnnnnnnnnnnnnnnnnnnnnnnnnnnnnnnnnnnnnnnnnnnnnnnnnnnnnnnnnnnnnnnnnnnnnnnnnnnnnnnnnnnnnnnnnnnnnnnnnnnnnnnnnnnnnnnnnnnnnnnnnnnnnnnnnnnnnnnnnnnnnnnnnnnnnnnnnnnnnnnnnnnnnnnnnnnnnnnnnnnnnnnnnnnnnnnnnnnnnnnnnnnnnnnnnnnnnnnnnnnnnnnnnnnnnnnnnnnnnnnnnnnnnnnnnnnnnnnnnnnnnnnnnnnnnnnnnnnnnnnnnnnnnnnnnnnnnnnnnnnnnnnnnnnnnnnnnnnnnnnnnnnnnnnnnnnnnnnnnnnnnnnnnnnnnnnnnnnnnnnnnnnnnnnnnnnnnnnnnnnnnnnnnnnnnnnnnnnnnnnnnnnnnnnnnnnnnnnnnnnnnnnnnnnnnnnnnnnnnnnnnnnnnnnnnnnnnnnnnnnnnnnnnnnnnnnnnnnnnnnnnnnnnnnnnnnnnnnnnnnnnnnnnnnnnnnnnnnnnnnnnnnnnnnnnnnnnnnnnnnnnnnnnnnnnnnnnnnnnnnnnnnnnnnnnnnnnnnnnnnnnnnnnnnnnnnnnnnnnnnnnnnnnnnnnnnnnnnnnnnnnnnnnnnnnnnnnnnnnnnnnnnnnnnnnnnnnnnnnnnnnnnnnnnnnnnnnnnnnnnnnnnnnnnnnnnnnnnnnnnnnnnnnnnnnnnnnnnnnnnnnnnnnnnnnnnnnnnnnnnnnnnnnnnnnnnnnnnnnnnnnnnnnnnnnnnnnnnnnnnnnnnnnnnnnnnnnnnnnnnnnnnnnnnnnnnnnnnnnnnnnnnnnnnnnnnnnnnnnnnnnnnnnnnnnnnnnnnnnnnnnnnnnnnnnnnnnnnnnnnnnnnnnnnnnnnnnnnnnnnnnnnnnnnnnnnnnnnnnnnnnnnnnnnnnnnnnnnnnnnnnnnnnnnnnnnnnnnnnnnnnnnnnnnnnnnnnnnnnnnnnnnnnnnnnnnnnnnnnnnnnnnnnnnnnnnnnnnnnnnnnnnnnnnnnnnnnnnnnnnnnnnnnnnnnnnnnnnnnnnnnnnnnnnnnnnnnnnnnnnnnnnnnnnnnnnnnnnnnnnnnnnnnnnnnnnnnnnnnnnnnnnnnnnnnnnnnnnnnnnnnnnnnnnnnnnnnnnnnnnnnnnnnnnnnnnnnnnnnnnnnnnnnnnnnnnnnnnnnnnnnnnnnnnnnnnnnnnnnnnnnnnnnnnnnnnnnnnnnnnnnnnnnnnnnnnnnnnnnnnnnnnnnnnnnnnnnnnnnnnnnnnnnnnnnnnnnnnnnnnnnnnnnnnnnnnnnnnnnnnnnnnnnnnnnnnnnnnnnnnnnnnnnnnnnnnnnnnnnnnnnnnnnnnnnnnnnnnnnnnnnnnnnnnnnnnnnnnnnnnnnnnnnnnnnnnnnnnnnnnnnnnnnnnnnnnnnnnnnnnnnnnnnnnnnnnnnnnnnnnnnnnnnnnnnnnnnnnnnnnnnnnnnnnnnnnnnnnnnnnnnnnnnnnnnnnnnnnnnnnnnnnnnnnnnnnnnnnnnnnnnnnnnnnnnnnnnnnnnnnnnnnnnnnnnnnnnnnnnnnnnnnnnnnnnnnnnnnnnnnnnnnnnnnnnnnnnnnnnnnnnnnnnnnnnnnnnnnnnnnnnnnnnnnnnnnnnnnnnnnnnnnnnnnnnnnnnnnnnnnnnnnnnnnnnnnnnnnnnnnnnnnnnnnnnnnnnnnnnnnnnnnnnnnnnnnnnnnnnnnnnnnnnnnnnnnnnnnnnnnnnnnnnnnnnnnnnnnnnnnnnnnnnnnnnnnnnnnnnnnngcaaacagacattgccaaccaagaagaaacagtcataaatagaacaaacagaacaatgagggacattcccaggtgaaagaaagttcccattgggaggcagaactccgctaatttacctattcactgccagtaacctcactgccagtaaccgaaagatcccgtaaaaatgtatttcccgtgggcaaggccaaaaaatgtacagattgccctgtctgagagcacccggcccgaaaccgaaaaatggacccagagtgaacagttctgggtctgccccataggaacgttttttggtatcttaccggattgtagcgaataggcagatcagtgagttccagaaannnnnnnnnnnnnnnnnnnnnnnnnnnnnnnnnnnnnnnnnnnnnnnnnnnnnnnnnnnnnnnnnnnnnnnnnnnnnnnnnnnnnnnnnnnnnnnnnnnnnnnnnnnnnnnnnnnnnnnnnnnnnnnnnnnnnnnnnnnnnnnnnnnnnnnnnnnnnnnnnnnnnnnnnnnnnnnnnnnnnnnnnnnnnnnnnnnnnnnnnnnnnnnnnnnnnnnnnnnnnnnnnnnnnnnnnnnnnnnnnnnnnnnnnnnnnnnnnnnnnnnnnnnnnnnnnnnnnnnnnnnnnnnnnnnnnnnnnnnnnnnnnnnnnnnnnnnnnnnnnnnnnnnnnnnnnnnnnnnnnnnnnnnnnnnnnnnnnnnnnnnnnnnnnnnnnnnnnnnnnnnnnnnnnnnnnnnnnnnnnnnnnnnnnnnnnnnnnnnnnnnnnnnnnnnnnnnnnnnnnnnnnnnnnnnnnnnnnnnnnnnnnnnnnnnnnnnnnnnnnnnnnnngacgggggggggagggagagagagagagagagagagagagagagtgagtaaaggggggggggcgtatcttttaaaggggtcctctgcacctgcgtgcagacttctttcccatggaaccttgggctgaccagggtattgcctgagtggattccaccaggtaacaggggcaggccagcataatgcctgaacctttcaatcagatcccctgcacctggagttggaaggtcaattcgggtcttctggaagaatagtctcttaaactcaaagccatctctccacacatccctggaaacacaatattgtctatttttacagatggggaaactgagtcttggagaagatagtttctcagattttccacagcaattatcacatcgtattacttgttagtaatatacaacagaacctcaagtccattttatttcctactgttaatctgtgtttgggtttgtattaatacatgatacttggtaaacagtggagctttctgttccagctggtcccacggcttttgagcccccaaataaacacaaagacgctattttagttgtaaatctgttggccaatggctagggcttcttattggctagctccgtcttaattattaactcatttctattactctacatatttccacatggtcttggcttaccggagaatgcctggacctgttactcctttggcagcctacgtggtgactgttctggcaggctttctctgcctacctctcccagaatcttcctctctcttagtcccgcctgtcttccttccttattggccaatagtgttttattcatcaaccaataagagaaacatgtatacagaaggacaactcccatcagtggtaaaccacttctgtttgcttgagggaaggaacatgatgtatttccatatatcaatgagtagtgtataattggtttgtattttgtcatttttcagacatcatgaagatggaaaggaactctaaaactattttatctatcttatgtatgtatgtatgtatgtatgtatgtatgtatgtatgtatgtatgtatatggactcagcccttccacagcatgcatatggagatcacaggacaagttttctctttctgccgtgtatgtcctggtgatcaaactcagttggtcaggtttggtcataagtatcttttcacccactgagctatcttaccaacatgtttttctttaatagacaggatttcactctagccagactggccttgcccttttggctgtctttctacaccagcctctcatgtgctatggatccaccacacctagactgtagaggagcttaaataggctatttaaacgtcgctaggaattgtttatgaagcatttgaatccaggcaatacgtcacccaggagtgattataaatttctttggttgcccgttggtggtggcgcacgcctttaatcccaacactcaggaggcagaggcaggcagatctctgtgagttcgaggccagcctggtctccagagcgagtgccaggataggctccaaagctacacagagaaaccttgtctcaaaaaaccagaaaagaaaaaagatttatttatttaatgtgtgagtggtctattatctgcatgtatgcctttgtggtaaaagaaggcatcagatcccactagagatggttgtgagtcaccatgtggtcatgtagttgttaggacttgaactcaggacctctggaagagtagccagtgcttttaacttctgtgccatcttgaataagaatgaccaggctcacctcgaactcagagaaattcacctgcttctgcctctcaagtgctgagatcaaagacatgcaccaccaccacccagctcctttttttaatagttccaaatttatttagaatgtgagtttacttaacattaacaattacattttgttatgagtgctcttacgttcttaatttttaattggaaataaattcttctcccatgtaatacatccaaccacagtttcccctccctccctccactactcctggtttcccttcccctctccatttcccttcagtaaagggcagtcctccatgagacaacatccaaacatggcaaaataagacaaagcaaaaacttcatatcgaggctggacaaggcaactcaatagaaggaaaagagtccaagagcaggcaaaagagttcgacacacccactcacactgttagtctcattttaagggctagagatggcatagcagttaagagcacttgaactatcttaccttcttccgtatacattcaggtgtctgcttctctgggttcctatacatctatcttggtccaggaccatcaggagctcttactttcctttattaatcactgtctgatcagcttctcctgtctattctgttcttcctctaccttctgcttattctgctacttctcttggcttgagtctctttcccacaatgaattattttttaatagtttatttttattttatatgcattggtgatttgcctgcatgtatgtatggctgtgtgagggtctcaggtgccctggaactggggttacagacagttgtgagctgctatgtaggtactgggaaatgaacccagttcctctggaatagcagtcagtggtcttaactgatgagccatctctccaggccccggtgaattatatttacttattatttattttttggtttttcgagacagggtttctctgtggtttttggaggttgtcctggaactagctcttgtagaccaggctgttctcgaactcacagagattggcctgcctctgcctccctagtgctgggattaaaggcttggcctcactcaaaacctggtggcactttgaattatttttttaaatggatttattttagggtcagtgagatagctcagcagatgaaggcatttccctccaaacctactaacttcagttcaacccccagaacccgcactgtagaaggatagagtcaattcccaaaagttatcccctgatctctacacacacaccatagcatcggtgtgtccacgacatgtacatacatacatgttttaaaattatttattaatgttcatatttgtatgggtatgtcagtgccagtgcctgtgtagaccagagatacaggatcctctggaacttgagttacaggcaattgtgagcttcttgatatgggtactgggaactgaactctggtccgctgcagaaacagtattaatgacttaatgagtaagctgtttctccagcacccatggtaaattcttattgattcttaagatttcattttaaatagaatgttcatagagaaaatgtcactttccacttggtcactcatggaagcattgtccagtatttggttgtaagacacatcttattttcagttgtcttttgttagttgaagaggatgttgttagtaagtattgtgggttagcaagagacttagagccatggtgagcaaattatgatttatgtctcaggtttcctgagagacttaatgtctttgttcctggtaatttatacaattctgactttgaaaaagtcatcatgttttccaattcagagttcccagaatttagaatacaaattttgcctttttaatttgtggaaaagagtttaagaaaaattcttacatctgttatctatggaagtctttcttcacttgaatataacttttggcaagcttttcctgtaaatgtttgaatgtgtgctcaagaaagctacaaacccttaactgaactgagtatttggccacttttcaaaaacattgtgagctttttggttctctggtttagatggtaagaaagcctgtcaataaaattaagtcttagtctgcctagtgacataatcttagcacttggaagacagaggcagtaggctcaggaattcagcttcattcttggctgtctacatagagagttcatgaccagagtggaatatatgagaccctatcaacaaaacaaaaacaaaaaacaacaataaaatcagcaaaaagcatgaaatcaaaaaaacttaaatttgactttctgcatgtcactacatttccatattgtctacctgatataaaaagagaagccttggggagctaaagacatgtcccagcacttaagagcacttgctgctcttgccgaagacccgggtttagttcccagcaaacacgtagcagctcacaactgtctgtaactccagttccagggaacctggcactctcttcaggctttcctgggtaccaggcgggtgcgtggtgtacatccacacatagaagcaaaacatttgtgcacatacaataaaaataattcctttttaaaaaatgtagagagccagacatggtagcaggcctttagttctagcacttggggcggtagaaacaggaggattagaaagtcaagaccatcttcggccacgcaacaagcctgatcacatagattatgttttaaagacagtaaataaataaataagcaagataattggcccagaaatctgtgatttgagtaggcttaacagattctacttcatggtgcattagaatggtttacagactaaagagggatatcagctgaagactggtactcacaggtccattttcctatgtgaggctatagctaggacatgtgtcattgtgctgtctcttcatctggatcttgccatgtagcatgacagcttcaagtcagccatttttccttttcctttcctgtttaatcaatgaaaaacatttattcagtttcaaattaaaattataaaaacctatcatcttagcttatttagaaaatggaagacacatgcctaaatttttcaaaaggaataaaaattttacctcctctcaaccctttatgaggatattaacaatctttttagtttttaaccccaagtttcaagaacacttacaaaaaaaattgttttggtgatgtctcaacaaaaaagcctctttttgtatatagtgtcaataagctgactagtacagaaaattatatatactgtatttttagcaatgggcaggctgctaccgtatcttggtagagctcaagtggtgctggggaaaaggagtttgctttctttccatggctgtgtgcatgaaacaagcaggaagatatgaagttactccagcttgtatcagctgtgctttcagacagctgaagatcatgtaatgagtcttgaagatttggagtatttgagctcagtgaagggtttgtgtttcccagttgggaactcccgtttgctgggctcccattatccttcaaaatacagaaattttttttttttttttttttttggtttttcgagacagggtttctctgtgtagctttggagcctatcctggcactgccctggagaccaggctggccttgaactcacagagatccgcctgcctctgcctcccaagtgctgggattaaaggcctacgccaccaacgcctggccagaatacagtatatttctagttgtccatgtagttagctttccataaccttacacagcagtcatctgaagatgccagtactgttcctgttgtgttacaacttacccgccagacctgagaattatgggtaccccactgagccacagcacagattcagattttgttgaatccccagaagtaagttctttcctcacaagttttaatgtgaaaattcttaggtctttggctgttattgccaggatgtagaaagatcttcccaaatttggagcaaatgcaatatcatgaacaggatccagtgaccatcataagagtttcagctttgcattattcatggtattttcactgtaataaaaaccttgagctgggcggtggtggtgctggcttgtaatcctggcacttgggagacagaggcaggtggatctcttcgaggccagcctggtctacaaggcgagtgccagagctgttacacagagaaaccctgtctcggaaaaaacaaacaaacaaacaaacaaacaaacaaaaaaaccaaaaatcaaaaacagaatcctccgaacctcggccattgcatggagtagactcctcttattacttctcacagctatagtggaagagtgagtgagggcaagagctggaggtgctccaagaaatacagctacagctcagcttacatgaggtctcactctgcagagacccctgggagagagcagacatctggtgcctcacatattcttactataccatctgctgagcaggttgctaacatgagacccatatgcacagagcaaatttcacattcgtgatgggtgctctgctgtctcctggagttacccctttacccattgactttgtcctggaaggtcatcgtttgattctcccgtttcttcccatactgaagctgtccagtcaaaagaacaggaagcctaagcctgtccacattcaggacaagcctgcatcccgcagatccactgtgtgtcttccagccagcggtgtaatgccagtctccattttcacttctgtctcctgagatggggaccgcctctccctgagggcactggcatttgttcagtactgttaaaccttgacggtctggtctgttgctggagcaaatggccgtctggcacttgtggaagacaaaagacacatcatagatgatgtccctgtggtccactgtgatgccacctgtcacaaaatagccagcgccaccagttttctttatttgttgcttcaagacttccaagatgtgtgaccagtgagaggtggagctgcctttttttttgtctttgacagctatgtcattatgtgtcatttgttactgctgttgaatttcattataggggtgatctacatttccccctgtacaaatccatctaactttttcttctttttaatataataaaaaattttaactgcttattcttattcagtcatgttagaacacagccatcccaagcctatatgtgtttcacactgtagggtagagttgaatcacattcagatagttatctgactctgtaagaagtttgctactctgtggtataggcattctgagcagcctggctgtattcaggagaggggtagactcgacttcttcttcttcttcttcttcttcttcttcttcttcttcttcttttaaagattttatttatttattatgtatacaacattctgcttccatgtatatctgcacaccagaagagggcatcagatctcataatggatggttgtgagccaccatgtggttgccgggaattgaacttaggtcctctggaagagcagccggtgctcttaacctctgagccatctctccagccctataatttaaaatatcttgttatatacccttctattttagtaaataaaaaggtttcatttttaaagtttatttttctaggatcaagcatgattgttcaaaatagcaaaagtgatgtcagcatctgcagggtccatcattttttcagagatttctactcacaaaaacctaggatccttgcgaaactgggcaccctgcacgtgggtgtcagttaggaggtctgggcagtctatggcacctctggcagtgtatcagaatttatccctagtgtacaaatggactgtggaagcccattccacaaagagggatgctctctcagcctagacacacggggatggcctaggccctgccccaagtgatgtgacagactctgaagatcccccgtggaaggcctcaccctttctatggaacagaagagggatgggatggggattagtgggggacatgggagaatgggagatagagggacctgagattgatatataaaataagattgtttctaatttaaatttaaaaaaaagaaaaaaaaaaccctaggatccttgattttgtccttagtaaaagagtttcatgattggcctctgtattgttgttgggttttttttttttttcctttttttcttaaacccttttgctcttttggggggccccaccatccagctccatgtctggctgtgtagctgggtggctagccccttcttttcttgctcctctcctcttctatctttttctccttctgtttattctctctgcctgccagcccctcttgtcctttttcctgctttgctgtgggctgttcagctctttattagaccaatcgggtgttttaggcaggcacagtaacacagcttcacagagttaaacaaatgcaacataaaagaatgaaacacatctctgcatcagtaaacaaatgttccacagcataaacaaatgtaacacatcttaaaatattccacaacacccgtgtgaagcagagttgtaatacattaggggatttttaacatagagatgctcaggaaaagggtaaaattaccccaagtgagcatacggacttttcaatggagagtcacacttaaatatctttaaggtagccaaatgtgcctgggtgtgatgatgtgctcccctaatcccagcattcagtaaacaaaggcagagccaagcagatctctgtgacctctttgaggccaacccggactacatattaaattctaggacagccagaggtacatagtgagactcttgtcttaaaaaaataaaatacagccaaatgtacgttttttggtatcttgtgaagttgtatctcaaagggttgtcaatgaacttaaaaatgaggtcatagggtgatagctgtgacaggcttgggtagcattacagcttgataaaaaagccactctaggtcacaaggactgcagaggaagaggattttcaaattattttatgtgcacgggtgttttgcctacatgtatgactatgctctgcatgcatgcctggtaccaagatcacctggaactggagtggacagatggttggaagctgtcatgtggttaatggaaatcgaatcctggtcttctggaagagcaacccagtgctcttaaatattgagccattactccagccccatatggtggaattcttgattttcacccagcagaaacctcagtcagactctgggaatatggggacacctttcttttctcatgtctccttaattttctgtctttctgtcctgcttagggtaactttttatttttgttaacttctttttcactaataaaaagagccttcatgtccccctccccccataaacactgtcataatccctttaacaatagtacttaaggctgcgagtggtggcacacatctttaatcccagcattcctgaggcagagggcggtgtatctctatgagttcaaggccagccaggtctatatagggagttccatgccagggctctatatagacccagtctcaaaaaagtatttgtaaagtgtcccagcatggtttgtcatcaagtcttgttcaagattgaggatttttttttttttttttagttgttgagccctaatccaagacctcattctcttaaaagtttaaggtgctagagagatggatcagtggttaagagcactggttgctcttccagtggtcctgagttcagttcccagcaaccacacggtggctcacaatcatctctaatgagatggtgccctcttctgacaagtgtatacataataaacaaataaatttaaaataaaaatattttacatgtatttagtgttgggttttatgtgtgtgtatgtgtgtgtgtgtgcatgtgtctgtctgtgcttaccactgtgtgtggaagtcaggagacagctttcttcctccaccatgtgggttccagtgatgaaactgaggcttaacagcaatcccttttcctgctgagtgatctctctgactccagtcttctcattcttaataaaaatacccgcacagtcaatatttttttccatgtatgtgttcatctattttttaagtacatttacttactgtttgtgcgtgtgcacctgtgtggaggtaagaggacagcttgtaggagttagatttctctttttactgtgtgggccccaggaactgaaccagggctgtgaggctgacagttggaggtaagcacctttgttagacccccggaaaactcaggtatccggggtcccaggccacgactgcggtcaccccaatcaccagacagattcgagagcttgatgaaaactgcacgaggctttttgtaatttaacgagttaaccccatgttagcttgggtctttcacccacccgccatggcggatggctagcaaaagacggctcttagggcctcccaagagatcttataggacagcgtaaggggagtgtctaggggtatgtacaggctcacgattggtgtgcctccaggcttggagggcttgccctgtgttgattggtcaactggttgttatggcccataggccctcccagggtggttgctatactttgtgtgtcattgctgtgcgcttgtctgtaaagcacacccagggtcgtaaagcatagcgccaccagctaacttctgattggttccttgtcacgaggcaggcatctgactttctagtgtctaggacaagagaagcacgtgttcagccgttatggctgccaaaatggaagctggtcccttcaccttaactgctgagccaaatcggccccacatctatttctcttgagaatgttttatctacatgtaagtgaagaacttatgttgtatttctgatttaaagctactgctgaaattaaatctggataaaacttaccctttggatcctgctaaaaaagaaagtcattccccctcctcccttttttttctggtttgaatttatgcatattccgcattctgatgcttcccccctcctcccatgtctccacagctgtgcatgccgaaagggctgtctttcagaacgcaagccgacaataaagaacctcagttccactcatttataatcacccgggaagatggctctcgcacctatggctttgttctcactttttatgaagaagttacgagtaagcagatctgcacagcaatgcagactctgtaccagatgcataacgctgagcagtacagcagcgtgtacgcttcatcctcttgcagtatggactccctggccagtagcattgatgagggagatgcaacctctcttttgaaactccagcgatacaactcctacgacatcaacagagacaccttatacgtttcaaaaagtatatgcctgatcacgcctctgcctttcatgcaagcctgcaagaaattcctcctccagcttcacaaggcggttacctctcagcagccaccacccttgccgcttgagagctacatccataatattctctatgaagtaccccttccacctccggggaggtcactgaaattttacggtgtttatgaacctgtcatctgccagaggcctgggcccaatgaactccctctttctgactacccccttcgagaggcctttgagctcctgggattagagaacctcgttcaagtgtttacctgtgttcttttagagatgcagatcctgctgtactcgcaaggtaggtgtcctttgcatttcctgttctaaaaacaagcacttcagccctgaactgctttgtttccttacagaatcaatcactgatcttgtctcttctgcataaaaagaataggcttggatgagatgaaatactagaggttttttctgtttgaagtgacagtggctgcagagataaacaggaaggagttgaaagtgttgttttgaccaatttggttatatttattttttaacgaaaacaactctttatccacaacattaatcattgatttgtgttgtaacctgttactgttactaatggactctctttcattacaaactggcaaagttttacatgaaaattcaggtgacacttgaaagtaataaatgtaatgtttactctgcaacttcctgaggccgacaactttggacatttgcctgtaggggcatttcatgggtgacaaagagaagacatgcaggcgagaaacagatacaactgccctagacctagcagcagatctgctagagttgtgtgtagttgtctttttagcctccaagtcccagaaggtgttacctttattgtatcttttattcaaagttctcccaacacagatttagttaagatactagcaggttgaattttgtttcactattatatttttgatgattggtattgagcctagcctggatatctgttcccatctgaatattaatttacagaagaaatagagatgctgtgtcataaatagatattggattgtaggagattgtaaaccagctgtgtgcactgttaaaactttggaaaatatggcacagatacttggattggcattttgctagtttgtatttaggctggcagaattgtggaacagtctccctactgtttgctgctatgtttattttttcactttccttttttatttttctattttaaattgtaagtgaaactgagccaagcaggctatatttatgcttccccatcttgtgtgtgtgtgttgacactttttgtgtgttgacagcccttcatgaggtttctcagtttatcctacacaatagtttttgataatgtgttcagtattgcgctttgttgtcagagagttctctaatggctgtctgagtcctttatgttccttctgctctcattttctcagtgctcactcatcattacctgtttattgtctgcttgaggctcggtagaattggggagttgcatgatgtcagctctcagtgtcagattccagactgtttcagattttgggattagaaatgtttaagtagggcagagaaatggtgcaggggttaagagcatttactctccatggtctttgcagatgacttgggtttggttcccagttccaggagatcttgaccttcttttgacctccaaggacactaggaacacgcacagacacacattcgagcaaagcctcatacacataaaacaaaataaatgtttaaccggtattggttttagaagtcataaatgccttagtctcaaacctctgctctgtcccttattaactataagtgctgtacgtgactgacttaattttcacaagtgttgtttctcgcccccatgtctctgggatgtttttgccacccacccacccctgattaattgtgaaagttaaatgagaagacctatctagaatttttagactatgtgcgatgttccttatatccagggggaaattggggaacaggagagataagtaaccatagcacaactaactattgtggtaattccaaaattgaggcttagatcagcctctctccagatgactaaaccatgttggtaactgtactggatccacacatgatctctccttacctgtctcagtactcatttttaaattatttactcattcttcgggcatatgatcaatgtgctatactaaatatttatagagtataaaatgaaaactttgtgtaaatgcaacgtgaacagagttttaaaggagtcattttgtcagtttgcactctggtgccctttgtgattctgtgtgaggggttttaaggatatttgctacttcatttgttacatattgataaatgtgtgctgtaaaatttaaaggtgcttcatgagccaaacaattaccatgaaaatccaaagtgaatctaagtagatggatttcaatgatgaaagtgttcattgaactgatttgaaatctcagtccacaatttatgtagacagattgagtctattgtctagagagtaattccgtcacggtctttttttttttcagtgagaattcacccaggaagccaaggctctttcctggcaccttatgtcagaagacataaggcgtaaccctgaaggttacatgaagccagacatcgtaagatgggagtatggccctcttttcaaaagaatagcggaaatataaacgatggggaattttaaacactagtgtctgacttttggtaccaataattaaagcctctagaacacttttggggcttgattacttacctcctttcggtcttcacagaggaaataagcagttactgccacctacaccaacccttattcctgttcccatgtgcctctgcagggcttctctgccattccatcgctgtgaggaaagtaaaagctcctcggagttttcttgaaaacattgaaagtcttttcattacatgctgctagtcatgacaaagtagaccttgtttgttggttgtagtttatcaatcataaaaaggaaacctaatattctgatagaaagaaacgatgcttccatgaccttgacccaaaaagcagtacaatttaaccagttttgattaatattttagtattactagatttggggggtaaggggcgtgaagttgccttgaacatgttaggcaaatgttctaccagtgagcacatctcccctactattagacctattttatgttaagcataaccttattgtcattaaaattgtttgtctttttttgtttttccagacaggatttctttatgtaacagccctagctgtgctgaaactaactctatagaccaggctggccttgaactctcagagatttgcctacctctgtcccccatgcacctgggattaaaggtgtgcaccatcaccgcctggcatttgtccttttttttttttttttttttttttaaaaacaatagggtctcatgtggccctggctggctttgagctcactctgtatctgaggataactttgaactggcttacaaacatatgttgtcatgtctagctctacttgtgttgtttttaaagcagtaaggaagattttattcaggccaattgtgatagatatatgggactatcctgtgcaagctgcctttaatagtctgattttacattgcccatctatctgaccatatgactatcataagttagaaaagattcagatgaaaaggtctttaccattgtgcctgctcttttatcactgctagagaaacagtgtatggtttagccagtccattaagctgatttgtttttggcttcctcagttgttgtcttaaaacaagacatgcttgggctggagagatggctcagaggttaagagcactgactgttcttccagaggtcctgagttcaattcccagcaaccacatgatagctcacaaccatctgtaatgagacctggtgccctcttctggcctgcagggacacatgcagacagaacactatatacataataaataaatctttaaagaaaaaaaaaaaagaaaaaaaacaagacatgctcatttgctttggagctgccatccataaatcacgtcaccctttttggccctttgagaggcgcatgtccaaatgacagtggaacttgcagattcccatataattccaaccagtcctaaagggaagagatgctctgcatttatgtatctctttgcactcagtgttagcaagatccgtataaactatttacatttcttcatgccactttccctgcagagagtttttctgaccttacaagatactatgagtacttcagatttcaagagtatttgatgtacttcagtcatgggatctgttttgtttactatacaattgcaagctcatagttgctcctcaaatggaaattctgtagttcattgcccctgcagtggttactaggaaataaagatatttaacatagtcttcatagctgtttcattgaggatttgtcagtatcagcttctggtttacattgtttgctcaggaagacctattcattcccatttagtgtgtctaattagtatgacttgaaaagtgagtttatttaatttctgtcctatagcaatacatactacatagaaaaagtgttcccataaaacatgcatgtaaaccctgcttaaatattctaattcattttagacttctaccttaattccataaccctaactttttatttgtttagtttttcaagacagggtttctccgtatagtcctttctgtcctggaactcactatgtagaccaggctggccttgaactcaaagatccacctgcttttgccttctgagtgctaggattaaaggtgtgccccagaactacccagcataaccctaacactttaatatcctatcatactaattatagcttggtatatgaggcatctctgtaaagttgttccagaaacctttttctacccctgaccacttatatgaacctgtacattaggtcttaggcctcttgtaaggagttgtgctaagggacactagtccttttgtctatcctgaatgtggattatggcccaaacaggctttagtttatatttttattatttttttagtttatgtgtatgggtgttttctgtgtatatacatgcaccctttggaactggagttacaggcagtataagccaccatgtggatggtaggaatcaagtccaattgctctagaagagtagcctgtgctcttaaccacagagctgtctttctagccccacagttgatatttcttttcttttttggggggtggggggaacatcagattccctagaactggggttagacagtcgtgaactgccttgtgggtactgggaatcgaacccaggtcctcgacaagagcagccagtgctcttaaccactgagccatccctttagtccccagtctaatgtatcttgatcttatccactcccaactcattcctttttctataagattcccttcccatgtttatatttttctccctttcccctccccttccctctgttctctcctcccttccctttctctctccttccctccttccttcttccctcactctctccttctccctctgaccggccccccatctctgtaactgagtgagttcagttaatgcttcctgctggaacgttgactgatcttgtttaggtaaaatagctgcagtgagttcatgagtttacatgcctaggagacagcatctcacagacttcttgttcttttctccctctcttccgtgacatccgctgagctttgtggaagtttatagagatgtcccgtttatgaccgagcactcagtggtcacttattcttagtacttagaccacttaggagtttctgcactaatgcttcccactgcagaaagaaacttctctggttaagactgagacagtgctaaccggtcatcatgtcctttttgttcaccccattgtgctataagtttccatattgttgagatgagtgccttgactctcctcccacttcatatccttttaaaaatgctttttttctttgtgtggtgtgtgtgtgtgtgtgtgtgtgtgtgtgtgtgtgttaggggccagtgggactgtcctgctgatgtgagctcagttcttagaacccacagtggaagaagaggactgactcctgaaagttgaaatttttttttagctgcatgcacatagtaaataagtagacaaaaataaataattgttttaaaattgttagacccccccccagaaaactcaggcctctggggtctcagcccaggacctcagtcaccccaatcaccaggcagattcaaaagcttgctgcaaactgcatgaggctttattgttgtttaacgagctaaccccatgtaagctcaggtctttcacccacccgccatggtggatggctagcaaagacagatcgaaggggctgcaaagagnnnnnnnnnnnnnnnnnnnnnnnnnnnnnnnnnnnnnnnnnnnnnnnnnnnnnnnnnnnnnnnnnnnnnnnnnnnnnnnnnnnnnnnnnnnnnnnnnncctcccagggtggttgctatgctctgcgagtcattgctgtgcacttttctgcaaagcacacccagagccgtaaagcatagcgtggccagctaaacttctgattggttccttgtcatgaggcaagcatctgacttctagtgactaggacaaggtcatggcaagcacgtgttactgttgtggctgccgaaaggggcaggcatctgaccttagtgactaagacaaggtcagacaaatacgtgttcggctgttatggctgccaaaatggggagctggtcccttcaaaataaaagagagagggaaactattcagaagtcagttctctcctccacccaatgcagaaaggtctcttgtttctgctagctgcccagtgagtttctaagcgattttctcgtcccccttgtcatttccccatagggacaccgaggttacacacatctggctttttacacaggttctaaggctccaactcagatcttgcggcggcttgtgtggtgttgatgttctagtttcatttctattgctctgaccgatttaggggagaaagggtttatttggtttgtaattccagatcatagtccatcactacagggaagctactgcatcaggagcttaaagcagctggtcacatcatgtctgtagtcaagcagagagaaatggatataggtataccccttgcttgcttacctgtgttagacccccggaaaaactcaggtatccggagtcccaggccatgactgcggtcaccccaatcaccaggcagatttgagagcttgatgcaaactgcatgaggctttattgtttttaacgagctaaccccatgttagctcaggtctttcacccactcgccatggcggatggctgcaaagacacctcgaaccggctgctgagagatcttgtagggcagcgtaaggggagtgtctaggggtacacacaggctcaggattggtgtgcctccaggcttggagggcttgccctgtgttgattggccaattggttgttatggcccataggccctcccagggtggttgctatgctctgcgcgtcattgctgtgcacttgtgtgtaaagcacacccagagccgtaaagcatagcaccaccagctgacttctgattggttccttgtcacaaggcaggcacctaacctctagtgactaaggcaaggtcatagtgagcacctgttactgtcatggctgccgaaatggggggctggtcccttcacctgtgttcagttagatttcctctttcagagcacatggtaagaacttttaccctgtttaccgggatggttgtccccttgagtgtatctgaatcatacgcctttgtttcacagtgggatatggctcctgtatcaattgaatcttgttctattctgaaacatctaaaaatttaaaaaagccaattttgatggcacatgcttgtgacccgaacacttgagaggcaaagacatgagggtctctgcaagtttatagcctacctagtacacacagttggcatacaggtcagctaggactacacagcaaaatctgtctcagaaaaaaaaaaaaaaagtgagaaataaagtcaccatcctagagtagacaccatgataaagattcttttggaaactgatgttcccccagatgaggatcttcacattatattcctgtagcttcttggttttgctcctctcctacatgagctaaggtcttagaagtgccctgttgtttccatataatttcaccccttggagaggggagattgaacctagtggccaagctcagaccaactgaaatctgagctttttccagcatcaagctctaacataacactctcctctaatttcattttagttctttaaaaaaaaaaggaaaaaaaaaagatgtttatttattacatacagtgtcctgtttgcatgtctgcctgcaggacagaagagggcaccagatctcattagagatggttgtgagctaccatgtggttgctaggaattgaactcaggacctctggaagagcagcctctgagccatctctccagcccctcattttagctccaaaataaccaggggagtttatatttcattattttattattggtttgcattcctttaagtgtctgtaaactgcctcccaagaattggatccattcctgcattccattggaaattgatgattgatcccagtggatcttactcccttccatggggactatgtgaccacccggagccaaaggatctctacacctgattttcttttttattgagttcagggtttgaaatgaagtctcactctgtagccccagatgacatcatgacactctgcttccatatccccacacctggcacagctcctccctttcatctctccacacactgcgtgtttccacaactcccagccattctagcaagtctaatgttttctgaaactaacaaataagaggcctttttcattctttctttcttttttttcccgagacagggtttctctgtggctttggaggctgtcctggaactagcccttgcagaccaggctggccttgaactcacagagatccacctgcctctgcctcctgagtgctggggttaaaggtgtgcgccaccaatgcccggcttgagacctttttcttctagcctccagttctgatgcttactaggtgataaacggttcagttcagttctgacattacccagagttaacaacaaactacagatttaaacgttcaagcctactagaatctcacttttgattctagtcataaatggaatccctaggctacccacctttctttctggctgactataaattcagttttcctgatagtctcaccctttgttttttgtttttaatattgttttggggttttgttgttgttgtttgttggtttttgagataaggtttctctatatagcccacataggccttgaactcatgatcctcctgcctcagcttcctgaatactaggatttcagatttgtgccaccaagcctggctccttgggtttgataatctggtagaacaattcacccaagtaataagaagcactttatatacttacaatcagctattatgaagaatacagcttggaaaggccaaatgaaagtggtgtagagcaggaaggtgcaggggaggggcttgcacgtcctctttaaggataattctgtagccacctcaggatgttccctagcctggaagcctccctgtctctggtgttctttttaattgtggaaaataaagtttaaacttgtgttgcacaaattctaattgtttttaataataaaaactcaggctgggtggttcagttaatcccagaactggggtggcagaggcaggtggatctctgtgagctggaggccagcctggtctacagagaaaccctgtcttgaaaaaaaaaaaaaaaaaggtgggtgggggcacttaactcagagagagctgttgggatgaaagttgaagaattagagaagcaaagtggccagccactagagttctcacctctaccagtgttcagaccaaaagggagatcctgtcctcagactgtctcctcagactgcctagattgcttcagactgtttcagactgaatgccttgagctcctgtctcctctgtccatccagccatatcacttcctgtctccacctccttaatgctgggattaaagggtttgggatcccaaatgctggggtcacatttgtgtgagctttgtttctcttttagacagattcactctcatgtagcccagggtggccttgaactaacagagacccatctgcctctgtctcccaagtgctgggagtaaaggtgtgtgccaccactgcctggcctttatggttaactagtgtgactactgggattaaaggtgtgtatcaccactgcctagcctgtatctgactagtgtggctagctttgcactctgatcttcaggcaagctttatttgttacattataaacaaaatatcaccacaaatttgtgtgtgtgtacacatgttgcagcacgattgtggaggtcagaggacaacttttaggagtcagttccaccctccactttgctgaggtagggtctctatcatttctgcggctgcaatatgtactctgggttagctggcccacaatgagactggtttgagttcctaatcctcctgcctccatctcccaagtgctaggcttttactctgttttgggataagtctcactaggtcatccaggctggcttggaattatttactgatcttcctgtgtcagcctccaagtatttggtaatacaggcccatacatacacctaacatttttgaacataagcacttaacctgatactattcagcatctttaattcagataactgatctgggtcgtagctcaataatagaacatttgcctagaatatgtaaggcccggagcagcattaaaaaaaaaaaaaaaaaaaaaaaaagtttttctttgctgttgttgtttttttcttttcaatgatgggtctcacatctggtgctggccttgagtttgctattttatttttatcagggatgactttgaacttcttattgtttcacatccacctcccaagtgctggggtcacagacatgtgcccgtgcctagtttatatggtgctaaggagtgaacctgtggcttcatgcatgttaggcaggtattctgccaaccgagctatgtgcccagggttaggagtataggcgaggcgagtaccaccacattcagcctttctcatttgcgttctaagcataaaacttaatattaggtctacatgtcattcacttccgattctgggccaactcacctgcccaagttttgtttaggatttatggagcaaggaggagggaggaaggagagagaagagtgcatgaatgagtttgaatatccttttgtgtggggaaggcatttgtgtgccactgtatgtgtgttgaggtcagaggacaactttgaggtgttagtccttgtctgtccactttgaggcaggatcttttctctgctgtacatgccaagttagctggccttcaaattcccactgtactcctatctcagtcacctgtctcccaggagggacagtgggatgagatgctgtactacatcgtactgtttaggccaattaattttatgttaacctttttctttgacagctttgtacatgcatgtaatacattgtttttaagattttttttgtttattgttagaggaaatatatatgacacagtgtaagtgtagaggtaagaggacagtttttgggagtcatctgtctctactgatcctaggagttgaactcgggtcattaggcagtagcactcttacacatctgagctacatctcgttgattctgtaatgcattctagtaactctaatctttcacaccttctctcatctcccttcccacctccacaaaccaccttcctccctacaagtctcaggtgcatgcatttttgttttgttttgtgactcactaagtttaagtagggccatgtccctgggcatgtccattggagcctggtggatattctaggcaaatttttgaaaatatgttttactatgtaacatagccaagcataattttgtcggtattcaaagttatatttcattttacattccttagttgttaatatacacatttattggccaattacaatgtagtaaaccctggattctattctgaaaattctgagattagaaatatagtggtcaactttgtgtggtagtataagcctttaattccagcattggctggctggctggctggctggctggcagaaacaggcagatctctgaattgaggccaacctggtctaaatagtgatttccagatcggccagggatacatattacgaccctatctcaaaataaatatagccatcacttggggctggtgagatggatggctcagtttttgggattttcttgggagttagttttggggttttatgcatgtgtttgtctggaagtttctccttgtttttgtttcactttaaatacaaacatttgtcaggtgtgatagtagactttgacactcaggaagttgagacagagggatcagtttagcctagtagtatgggaccagtctgggaacacagcaagactacatctcttttataagaaaaagtgatgcaggaggtggctcagcagttaaatttgcttttcattatgtctaacttgagttgaatccctggacccacatggtggccagagagaaatgactctttcaagtcattttctaacctccacaggtgacacacatctatcttgcaccctcccccattctcccttccactaaatggatgtgtaatttttaaaagtgtgtgtgtgtgtgtgtgtgtgtgtgtgcagagacagagacaagtatacaaaggaagatagtaaattagggaacagaggcatatcaataattataatagaattataatagtttagacaagatagataattaatgttgtaaaagaaataagaaatcctagcacttagagggcagaggcaggtagatctgtgtgagtttgagaccagcctgatctacaaataagttcccagacagccagggctacacagagaaaccctgtctcaaaaaacaaaaaacaaacagtaaataaaaaattaagcgagtaaataaatgtgcttgtggtactttgaataaaatgactcccttgggttcatatatttaaatgcttaggtagtggcactatgtgaaagacttaggaggtatgaccttctctggggtaggtgtggccttgttggaggaagcttgtggggggtgggtatcaaggagtagcatgagttctaatcggttttaataataaaaacctggagtcagttattggcattaatactgaagatcagagaaacaaagtggccagccactagatagttcctttttttttttcccaagatgtatttacttattatgtatacattggtctacctgcatgtatgcctacagtaggccagaagagggtaccatatcttactgaagatggctataagtcaccatgtggttgctggaaattgaactcaggacctctagaagagcagccagtgctcttaatctctgagccatctctccagctccactggagagttcttacctctaccagtgctcagaccaaaggggtgatcctgtcctcatactgcattctcagactgcttagactgctcctcagactgctctgtctctctcttttgtttcctcttgccttacagtcttctcactgtatctcactccagccataacacttctgtctgcaccaccctagtgctggcattaaaggtgtgtgatcccaagttctgggatcactttagtgtgagctctatttctcttttagacagattgaatctcaagtagcccagggtggccttgcctctgtctcccaagtgctgggattaaaggtgtgtgccaccactgcctgacctctgtggctaactaatgtggctagctttgcactctgatctccaggcaaactttatttgttaggtcataaatgaagtatcaccacatcgggctttgaggtctttagaatagaacagtaagatggtgctgaatgggaagacggctcagtcagtgcttgccaggtaagtgtgagtacctgagttgaaatccctattactacataaaagccagctgcagtggtacacacctgcaacttgagctctgaggagaggagtggtgaaaacaggtctctggaggccagtagccaggcagtatagccaaattggtgaactccagtgtctcataaaataaaggtggaaagcaattaaggaagacatattacatcaacctctggcatgcatatatataaacacaggcaaaagaatacttaaagaagcattttgttcttttcttttttgctgtgctagtgattgaatacaggctttgtgcatgctagacaggcatcctgccactactttattaccagctcctgctgtttatttcttgactgagttaaaagggatgctctacctctgtgaagcagtctcattgctaaaaagtgtatgatgtatccaccagtcatatagagaatccaaacctaaaaagattagacatagaacatttacaagtgggaaaacggtagtaaaggaaaaacaaacagcgtccctgaaagtccagaatagagaaaaatgtgtaattaatttttacttcccatggtgttttttctataaataaagcaagaagataacacacagtacaaaccatcattacttgaagaaagtgtattttccaggagaccgcatatttctccagtcacaagtaaactagctaccttgttaggaatttagtttgtccagatcccttttcttttcagtttaggttcacccaggagacagaaatcataaagtagtttaggatgaggaatgtaatatgaattgttttggaaaataagctgtaaagtgataaactctgaagggtactcagtgaagcacaaacatttaagtgggaacccagaccccaaagctgtaatggattcctcttgaagaaattctgttcataaggtgtggagaaggccagtggattgcttgtcagtatgtttcctggaccagagctgatccttggccactgatctaacagaagacaaagtccaaaccccatgttgtctgtgactggtggaacagacccacaggacttgtttgaatgtcactgtggtatgagatctgagattgcagggtagtagagaaccatatgaggaagtagccactgactgctcagtcttggcatgtggcatagcagtgtgccccctgataccttcacacacccacactgctggtcttccaagcagcaagagcaagacatattgcatactgacaccaggaaactgtgtgtctccatcgccctctactggcaaagtataatattgtattcattgtcaaaatgggtagaggccaatcagttataagaactggatgaatttggagctgagaggcatttaatgaataattggcacataatttgcttaaagctccaagctagccttccacattatctggcatatgatggagaaagaaataataaaatcagacactaatgtcttagaactgatagcccttgctgtgtctatggactgatgtgatcctcatgtctaagccgtgcttttctgtaggacttaaacaaccccaaaagaataacaagcaatgttattatgtgctccacaaaatacacacactctctctttctctctctctctctctctctctctctctctccacacacacacacacacacacagaaccagggtctctctgttacataccaggcaaatgctctaccactatcctacattccttacactttatactcatcatagatcaaatttactgagatactgcactttgattttcttgtcggactttctttggactgccagcccccaaataatgacacagagacttattattaattgtgaaagcttggcctttagcttaatcttgttcaaaactagctcttataacttaaattaacctgcttctattcatctatgttctgccatgtaactttttacccttctctgttctgtatgtctggcttctgtgtctcactggagtctgtggcagcctcagattctgaccctgggttcctctctctgtctggaagtcccgcctattctcctgcatagctattggccactcagctctttattaaaccaatcaggtgccttaggcaggcgaggtaaaacatagacatatcctagcacagtttgctcaagtatccctcaacaagataactacctggtcacagagtacttcattttgacagcttccaatccaaagcaagtctctgttttcttaatgccccaaattatcctgcaaaatcccaaatactatactagtctttcttcactaagatgttccacagttcctgaagagtgttcatattatttctctgcaaaataaacccagctttgtctgtttgttttttttaaacagggtttctctgtgtagtcctagctatcctagaactcactctgtagaccaggctggccttgaactcagagatccacctgcttctgcttcccaagtgctgggattaaagatgtgtgtcaccatcgcctagccaaacccagtttatttaagtacaagctaattcctggggtggttttttttttttgttgtttggtttaactgactgaagggtcatagtaaaagaattaatttttttgtttttaaatttttataattgtctttaaagtattatgatgaacactttgcacataaacctttaaaaataactctagaactggatctaatttgccagtcggatactggataagggctcttgctaccaaggctggtgactagagttcaaccccctcagatccacacactggaaggagagaactcactcccacagttagcctctaacctccagaggtttaccataacacacacaaataaatatgaaaagaacaattgtgatttttgaaattagttttaagtaggtctctgagctctacatctgtgtatgcatagctagaatgagtcatttgctaatagttctccacaggtggatgctaaccatggcctagttattatatagggtatttggatttccttattatgtacttaggcatacgttaattctgttatataccagtagttgtactaagtaaaaaggttacaataaaaaatttaatccctggttgaaatctacagtatagaatccaaggacatttttctctggatttgttcttttggaggtgacggggagagggtaccagtgttaaaactgggttttagctaaataacccagactggcctctgtctcgtgattcacctgcctcacctttctaggtagctgggactacaggcaagtggctgtaacacggaagaaaaaaaataataaaaaacagagacagatattggccttcaacctgaagatcagggaagcaaagcagcctgccactagcttcttacctctacctcagaatgaaagggctgatcctgtgtccacgagctctcaccaagcctcaggctgtttcctcagcgtggctggagaatcctaagactgaatgtctcctgtcctccttgatacaaagccttcctgtgcagctggagaatcaatgcctcctactcaatactgaagatgctgcttccattttctatattcttctagtgtcgggattaaaggcgtgtgatctgttactcttttagactgattcaatctcatgtatccctgtgtggccttgaactcacagagatccatctaccccttaatcctgagtcctagaattaaaggtttgtaccatcacctcctagcttctagctgctaggatgaaaggtgtgttcctggcctccacattttaagagcatccagggctgtgtgtgtataatggcatatgcctttgatcacagcactggaaatacagagcagaaacaagctggtctctcagaatctggtctgcataggaagatgctggagagagaggcaggtggggaagagagagagaggatgcaaattgctcaccactgcttccaagaagagtgctgatgctgtttctgtacgttctgcaagctattcaggtgaaataatttaactctgtaattacaatgagctagaactgacctactttctccatggtcatgacaaaatactttttaaattttttaaaaggtttatttatttgttgggcagtagtgatgaatgcctttagttcctgcaaaggcaggtggatctctgtgagttcaaggccagcctggtctaagagtgagttccaggataggctctaaaactgcaaagaaacagtgtctttaaaaaaaaaaaaaaaaagatgtatttatgtgcatgactattttgtatgcattcatatgtgtgcacccatgcacctggtagcctcaggtcagcagaggggctcagatcctctggagctggatgactgatgtttattaggtatcgtgggtgctgggcatcaaacccaggtcctctgcaagagcagtaagttctctaaaccactgagccatctttccagttcaaaaacatttaacacaattttttttctgatgttttaggtttgctgcagcacctgttttcacttggattcttcccttttatttttcttgtcctgtacagattatcagcgcctgatgaccgtagcagaaggcatcaccacactcttgttcccatttcagtggcagcaagactatgtgcccatccaccctgcctctctgctccattttcttgatgcccctgtcccttatctgatgggtcttcaatcaaaagaaggaactgaccggtctaaattagaacttccacaagaggtaaagctggtcattcatgaggaagcacgctatttgttgacttaggtcatggctgtcactaagtaacattgtctttgtgcagttgttacatctgaatctcccagatactgttggttagggcctgagccctagcctgcaaactgtttcttctaatacttgatatagcacaactattagttaactacacctcaaagaaggacagtaacaaatttttacaacttatacatttctgaaggtggttcaataatagtttttttttaagattttatttatttactatgcatacaacattctgcttccatgtatatctgcacaccagaagagggcaccagatctcataagggatggttgtgagccaccatgtggttgctgggaattgaacttaggacgatcttaacctctgagccatctctccagccctcaataatagtttgatattaccattttattactctaaaagcattgaacttttttccatcctcgtgctataaattttgttttaaagtgtattagtcagagtactctagagtaacagaattcatatataggataaatacatacatacatgtatgtgtatgtgtacatacacacacacacacacacacatatatatacatatacatatatgtatatatggtctcttgccagtgaaggaacagacttgccagcaggatgagagcaaacaggaaaagaaaggggcttccttcttccgtgtccttctgtgggcttccagcagaaggcaaggcccagattggaggttattttttacctccattgaatggagagtgctctctttcagcaaacgagataatggaaacagcaaacactttactgcttgccatctttagctgtagccagttagtagcctattctcaatgttaccttgacatggtctgtaagacaaagaccccctaacttcttggcactttaatcttgttttcaaatatttaggaataaagtaatcaagagttcttgaaatcattttatatgtaatttttagctctgttaatgccactcaaatttgggatgtaaagctttaaaatgaaatattgaagaggatgccatggcctattaaaagcataaaacggttaatggcattattagctatttaattatcacctttcttaataaaaatcactttagcttgttcttatttctcatagggattctcattctaataagtgaatataagggctggcctgtggtagtgcatgcctttaatcccatcactcgggaggcaaaggcagacaaatctctgagttcaaagcctggctgatctacagattgagctccagggcagccagggcaagaaatcaaagtaaataaataattaaaaaaaaaaataaagcagtctttttaaagagatttaaatgtgtacactagtgatgctccctctcctttcctctgaaaactctgagagaaaatctagcaagaaagtttctaaagaaagatgccacttacaaaattattaatttaggaaagtattattttagttgttaggtggctaatataactgcctagacttataattaaccacctactccctttgctcatgattccaaaatgatagatgttagtagccatttgttatagtatcttttagggagtatatggggaaggtggaaaaatggagcactaagtattgattactaagtcttgtacctcaccctcagccattcttaaaagaatcagaggctgggattaaaggcatgcaccaccacatggcagctcagaactgtctgtaactttagtcccagggatctaacaccctcacacagacatacatgcagacaaaacaccaatgtacatgaaataaaaataagtctttaaaaataaatcttaaaaaaatgaaaaaggaaaggaaataaattctagtgggaattggagaaagaaccatcatgtactgctgatgggaatgtaaattgatatagccaatatgaaagtcactgtggacattcctaaaaaaattaaaaacagaactaccatatgacccagctataacattcctggatatacacactcaatggaatctaaatcccaacaccatagagacccctagatatccatgtttattgatgcactattcaaaatggccaagatagggaatcattatagctatgtatcaacaaatataataatacgaaaaaatgtgatttgcatgcacagtggaatttcattcagccataaaatagaaagttttgtcatttgttagaaaatggatgaactagagatcatgttaaggacataaacctggccaggtggtggtagcacaggctgttaatcccagtgttgaggaggcaggggcaggagaatctgagttcctggacaaccagggctttacacagagaaaccctgtcttgcaaaaaaacataaaaaataaataaataaacctgctcagaaagagaaatattgtatttttttcttatatggaaactagattttttaaatacatacatatatacatacatacatacacacacacatacacacacacacacacacacacatctctctctctctctctctctctctctctctctctctctctcaatgaaagtagaagtgtggctatgtaaggtgaggaagggcctaatgggaaggttgagagggtaactgagaggaagacaaagtctcacacaggatctaagtttaacatttgggaggtggaggcaagaggatcataagttcaaagtcatctcagttgcctaggtagtttgaggccagactgggataccaggggtggaggcagaggcaggcagatctctgagtctgaggctagcctggcctacatagtgagtttcaggacagcccaggctacatagagaaaaacctgtctcgaaaatcccaaataaatagataaataaaattagaaatgcattattatcggggaattgtgaacccctttgcaaatccttaactctcattgataaaacaagacaactcagaaagtagcaaagacaattagagctgtgggcatgatggaaatcagttgctgggaagattcacatagataagaaagttacttgttttgagttacaaagcaggcaaactcagcaatggaatcttctagcacccaaactgggagtcagagtcttcagaaatatcataaggatgcccagaggaaagtgacttagaattttggctggtatctgacaagataaataaaaaagagaagaaaacaaaccatactttcctaaaaagaacaaaagcttggcattgagaatatataaacagtgcattgcaggagggtttctggcattaaagggataattatttctcccatcttcttgagatgtctttaagtataatggacaactttcctgagggatgggtagtttcctatctaggtgattgtattaatcagagttcactagaggagcagaattgggggttatctatttatttatatgtattgttacaattatatataatatatttatacataattataacaattatatggcatataacaaatatattacaattatataatacacatttttcttatttatagggtaggttagtggaatgccttgtaggctgtggtccagctagttcaacaatggctgtctaccaacacaaggttcaagaacccactagttgctcagtctacaaggctggatgtcttagctggtctttagtatatgccagaatctgaagaagtaggctctaatgccagtgaagtaatggacttgccagcaagagcaagatcaaataggcaaaaaaagtaaacttccttctcctgtcttctttgtatagggtgccagccacaggtatacatctcatttaaggtggacttcccacctcaaagatgtagatttgaataagaaaaaaaatccctcacaggtgtgcccagtctttggggggttttagttaattctagatgtagtcaggttaacaacagtggtcagtgatcagtatgccaatttggattaacttaaaggttcgacaagaatacgtccatctttgagaaatttagaataccatgtctctacatcgagccagaggtatagaactcagaaagtattcttgtgcaaaaatcatatagaaaaaaacttttttggttttggttttttgagagaaggtgtctctgtgtaacagctctggctgtctgattgtcctggaattcgctctgtagaccaggctggcctcagatttacagagattattggcctgtgtctgcctcctgagtgctgggattaaagacgtaatcatgtaaccacctgaccaaaaatcatgtaacaagtaaattaaagaatattaaagaaaaataaataatctgtataaaatagctatactttaccatgaggaaataactgttcccttaatgagttttagcagtcttgctacctccacctttctgcctttcatatattttaaatcttttctttaacttttattgattctttgtgggtttcacatcatgcattcactcatctccccatcccctcacctccaccctctgcccttccaaccccccaaaacagaaccaaatttaaaagaaaacataaaaagaatcttttaattaatttttatttaaatttttaaaaatcttattttgcataccaatcccagttccccctccctccatccttttatttcccttatcatctccctatcccacccctcatccactcctcagggagggtgaggcctccgatgggggatcatgaaagtctgtcacactatttgagagagtatccctccacagggaataggctccaaaagcccattcctgcactagggataaatactggttccactgccagaggccccgtagactgcccaagtcctccaattgacacccacattcagggggcctggttcggtcttatgcatattcctcagatgtcagactggagtccctgatctcccacttgttcaggtcagctgtttctgtgggtttccccagcctggttttgacctctttgctcatcactcttccctctctggattccaggagtttggggagagagaagaatctggtagtggaagttgtagggtagcccgttgagtcacacagtttactctttacttggaagtgttcattgccacgaatcattggattggtctgactcaaggtctctgatttatactatgacacagctaatgggcactcattgggtctcctcttggatatcctgttgtcctgtgtcttggcgagcctgctggtttggatctcaagactggtgtattaccaaggatataggaggtaacatctagacctagttatggaaggaggatctatttaaatgatctccatgcctgataacatcctattagctacctaacatcatgaggggggggggcagtatttaggtgatgaaaagggaaatagagttagaaatagggaagataataactcaataaaatggaagacaaatacgaagtatatacaaagtataaatgtatgaaaatgccataatgagagggctagagagatggcccagaagttaagagcactggtcctgagttcaattcccagcaaccacatagcagctcacaaccatctctaatggtatctgataccctcttatgtcgtgtgggcatacatgcagacagaacactgtagacataataataaataaatctttaaaaaaaagaaagaaagaatgccataatggaacaagttcttttatatgctagaaaaacatttaatgaatgaaagattctgttgataaaggtcctgggtacaattcctatcatctcttcatacataaaattctgagccttgaaagggttgacttaagaggtggtgtgctgaaatggagcccaaggatccagtctcaatttccaacactgcatataaccagcagtaaatgcagtgtaaagaaatgatttttgagccaggcgtgggatgcatgcctgaaagcttaaggcacgagaggtggaagcagaaggagctggagacgagtggcatgctcatctcatctgtatagcaagttcaaggctagcctgggtcttctatttttaagatggtctaaaaatagtataatttgtttctgtttataatagaatattttagaacattgacttcttttactccaagttgtcaccataaaaacacagttctcaccttaaagggagatggtttattctggagacaagaatgagtgacctttaccagagagcacagatttaaatgaccctaataccatattctaacatggcaatggtttcatgaatttttcaaatgtgttggtgggaaaattaggtaagcaggttacagcaaagcagggacatctctcctataggcctcaagtgttacttgataacattctttgtgatgagggtttttgtttttgttttttgttttgttttgttttgttttgtaccaccagttccccaataatgacatggaaatttatgattaattatgaatactcagccatagcttaggcttgctctaactcattcttataacataaatcagcctgtcttttttaatctacgttctgccacgtggcttggttttctctgttctgtatcatatgcctgacttcttcggagtctctggtggaatccatgtgcctagctagattccttttcttctctctctctctccctggaaatcctgcctagcctctctttcccaggtattggccattttgcagataaaccaattagaaggtgccatggcaaagactcatcacagtgtacaaatattcttcaacaattcttactttaggttggtgttagctaaagggtctgggtggtaaattcctcacttacaaaggtgttaggccaatcacaggtgggcaagaaaatgcgatttatgaggctaaaaatagcccgaggtactttggctctgaatctacaattggaaccctttgaagtcatttaagttttaatagtcagccttgtacaagttctgaaatctctatgtttttggccccccccccccatttcaggctaatttgtgcttcgtggatattgacaaccattttattgaattgcctgaagagttcccacagttccccaataaagtagattttatccaagaactatctgaagttcttctccaatttgggattcctcctgagggcagcctacattgtagcgagagtgccaccaaactgaagaatatggttttgaaagatttggttaacgacgagaagaatggcaacactcccaccaataacatcagcgtgtatgagttcatgaagggcaatgaaaccatagcccgcctccaggctctcgctgataggactggcgtgactgtgggaaaaattgacctctcagcctctctgaatgaaaaagaaaaggatttcaaattacagtgtgaagaggcagaattgagggactaccagctcaacgtacaactacgagaagtctttgcctgccgctttatacagatgtttgctgactatgaagcgtttgtgattcagactgcccaggacatggagtcctggctgaccaaccgggaacagatgcagaactttgacaaagtaaaaagaaccatagttttcctctttatgcttactaatggcccacatttccagtcttttttaactttttaaacagtttacttatttttagtgcatttgtgttttgcctgcacgcatgtctgtctgagggtgtcagatcttggagttacagacagttgtgagcagccatgtgggttctgggaattgaacctgggtcttctggaagagcagccagctagtgctcttaaccactgagccatctctccagcccctagtctttttaactttttaagcacaggtttttatatttccctttttacatcctattaagtattttatgctagataaatagtttcacacaaaaacaaattcttgggaggtagaagcaggagggccaggaatgcaaggccatcctctgctatgtggtaagtttgaggccagcctgggatacctgagacgggtctcaaaaaaaactggcctttgaattgtgtattaaattggtgtgtgtgtgtgtgtgtgtgtgtgtgtgtgtgtgtgtttgattttcacgagtctactgctcttgtaagagttttatttactcttgtgaccaagtctagaaaaattaagcctgttccttttctaagagatgctcactgacagtttagtcctcccccaatgatgtaacacccaatttgttcatgtaaaggtaacagttcaatttcataagcctaattttatatcttttgtatcttaaaagagaacagatgagtaaatttggtttcgagactgttagtataagattatgttccagagtttttagaaaaggagactaggagatgtagtagctctttactgtcttactgtctactggagcttcttgctcgggttctctgtgttctgtccaaggcccttcatgtaccccagctctctccaacagacaaaagcactagagatgtatgtgaagtcatttaggtcaccgggatgcagttcagtcctctacctctgttagtgaacaagcataatgctgctgttagaatgtgtcataaaagacctcccccaaaagagctattacactccaagatgctaagtgtttaattttggagcatctggcaaacagatattaactaaatgctttgtgtagtatcaaagaatattttctgatttcatcatattttttcttatggaggataatatgccatgtgcatcagaaattgctggtgtactttatgcctgattaaacgtctttaatattaagaaaccacttttcaaatatatttccgccctgggacctgttatcatatttgcttagttttcattatgctttctctccagtttgagaactaatcttacatattcatgatctatctttggggcatgaattcatatttaaatttaaattcatatcctcctagtaccttgttctttcttactctctatgtagcttcattctagaagtgggatcctttctgtataacccctaagaaaatgaaatttacatgtcagattccagaaagctagagtcatcttatttttcactaaagaagtatgcagggcatagtcatcttgaaagtcaagttctggttgattttaaatcttacagagcacatgaatctaaacatcaaaagctagatgtttgcccgattttctaagggggggggctgtttctttcctatacaaagtaggtttgatgtttatctatgaagtaacattaaggagatggattgatttctggagactgctatgagtctgtctggatatttgtacttacataagtacatttaaactatggaagcacttaaatcaaaaagtggactctgtaaaaaatcttttattaaaagtaccctgaaataataaaatgggaaaattaaatatgctaggaaaaaacttgataaatactaaaaataataaccttatgttggaagtgtccttccatctttctccttttggctctgacacactgcatctaactttgaagagtgaaagaatgaaaagaaaaaaaaaaaaaaaccaaccgagtaactggactaggaattcactcacaagtttcagctcatcttaaccaagatgagacttcctacatatatcgtacatgagctgaagagagcaacaacaacaaaaaaaatgtgaacacttcagattagaagccaggtataatttattgcatcaagcaaactggcaagagggaagggtagcttgttcatttttgaagatcatttgtatgttttttttttgttgttgttgtttttttgtttttttttttttaaggcaatgtttctctaagtctcagatagttgtgtcaacacagatatggaaagagtttaatcttgagttaacaagaagagtgaacctagacaaacatctgcttgaagaccaaaacgattttgcccataggcacaaattccatgttattattttaaaggatttatttttatttatttatttattctgcatacagtattctgcctgcatgtctgtcttcaagccagaagagggcaccagatctcattacagatagttgtgagccaccgtatggttgctaggaattgaactcagaacctctggaagagcagtcagtgctcttaaccactgagccatctctccagcccccgtgttgttattattaagttcgtaattgaacatatgcaaactattgtgcatataaatgtgtgtgtacatatataatatataagcagttgctcatcttcagccttttggttagaggttcatttcctaggctaggaacagagaacatgagagatgactcactgggaagaagaatcagaatgtaatggtaagtcacgtcgatggttgacagtgcatccaatagcaacttatcggccatcagtcattattgatgtcctctctcctgggcagtggtccttgggatactaatataaatcagttttgaaaggtaagatcaagctagcatcctcagtgaccaaaaactctacaaacttagaggaaaggggaaaaaaatggactggcaagatcttaagtgtcaagcatcgattgtatgtgttataagtttaaaaagtaataaccttaacaaactgttcatgttcatcttacataatattaagacgacctcattaaagtaataatttgctaattatctccttacaggcctctttcctctcggaccagcctgagccttacctgccatttctttcacgcttcattgaaacacagatgtttgccaccttcattgataataaaatcatgtctcagtgggaagagaaagaccctctgcttcgggtctttgactctcggattgagaagatacgactgtacaatgtcagggcgcctacgcccacccttcggacatctgtgtatcagaagtgcagcagtttaaaagaagcaggtatgtttgccatggcttagaggaaaataatccatgatcatttctttttatagattgttgacttatataacacaaaattaattttctccttttttgggggggggtttgagacagggtttctctatatagccctggccatcctagaactcactctgtaaaccaggctgggcctcaaactcaagagatctgcctgtctctgtctcccaagtatcaggattaaaggtgtgtgcctccactgtcctgctaaagttaactttcattttaggacatcaggactaaccctggtattatcaagaagtatttttatactttttcttcagatttctgtgaatcactatttctgttgacattcaaaagatgcagatttttgctattttcttgtgttagaaaaaaaatgttaacctctatctttggtgttatcaacttaaagtagttaacccaaaactgggcatggtggtacgtacgtgcctaagtcctagcactcaggaagccaaattcaggaagcctggcaccaggcatttaaagccagcctgggtaatgtagcaagattttgtctaaaataaaaacaaagcaaaaaggaaatttagttatgtaaaatgctgtctagcttacataacttcaacagtacatatttgctttgtggtacagttagtcttgaaattaaatccttggatttttccattcaaattaaagtttcccccaaccctaacaccaatttccttcaaagaatgatgaattttccttgtctgattgtgaaatatgctctgttaaataaataaccccactaatagccaacatttgagcctttcttacatgccagttatgccagtgtttgttttgatatgcccttttacatgtacccttaatgacaggggtatatacacaggtatttttgctgttgctttattactattattctatgggtgaggaaactgaggggttaaagaatttggctgtggttcttctttttggttttttttttttttttttttttttttttttttttttttttttttttttttttttttttttttgttttgtttttcgagacagggtttctctgtgtagagatctgcctgcctctgcctcccaagtgctgggattaaaggcgtgtaccaccaatgcccagcttggctgtggttctataactagttctcagtggagccaccagttggatccagatttgactgacttccagtacctaacatcttatccttttattggtaggcttattcattaacaaatatgtaaaacgtaccaattcatggggttttgcacatttatgcctagttcccaacccattctttgctgaatagaaacatatatccttttatttctttccattaaattaaaagtggcacttttgctaggcagagtgacacatgcctttagtccaccacatacttggggtcagaggcaggcagatctctgtgagtttcaggctagcctgtctacagagcgagttccaggacatccaggcctacataaagaaactctgtcagggacgggggccgtggggggggcgagaggtgtgtgtgtgatattttttatttgagaccaaatgttctactgtataagaggacacaatggtgtgtagcttctttgctctgcttctgttggttgcttagtccttcctttccatctctatttaaacagttcagtcatggaagtaataacgttgctttagcatttccaaggaaagaagtagtaaataataacttttatgcagtcttcaaggcacattgttgtattcctatgtataagggtgattccttggagccccttcaggaagtggcaagtctctctgtgtttctagaagctgaggagatagaataaataaagttgttgagagaattatgacttttagtgcttttaatagttatgtaaataccttgggaaaatctcatccctctcttcctggcagaatttttaaaatgaagtacccagagttccttagcttaacctgtgtctgggaaatcttaccaattaaaatggattttctctttgccccttggagcctgataatctcactctcatctcagaaactgtgtgaggtgcttttgaaaatagtaccattatagacttagcatgcctgaaaataagattaggttatggccatagttgccaggaattttgaaaaagtaaaaggagactgttgtctatggctcccccattcagcacagataataaattggtgtgtgtgagggagggaaggagggaggagagagagagagagagagagagagagagagtgttcagtgctaggaatttaatgcagggccttgccttgggcatgacagagaagcacacgactactttttatatttctttgttttgagacattcccagtcattgcataggaaagctttgaaccctcaattctacttccttggcttcctaactagctaggggttacaggcctgtaccaccaggcctggctccgttcattctttacaggtgaacctgtgaggcgcagactgtctactgttgacactggctccagagccttgtgattacagaaaaaccagaaatggatagtaatatgattttctttctcctcaccaatcaccacaaatcaatattgatacaaacccttgaaacttttaacaatagacccagcctctgacctcacaaagcaggcatttgctaatttctgaatattcagtattccctggcagtataagtactaaaaagttacattgctgtgtgctccctatggatggatatctgtaatatttccaatatttacttaaagctaatttttctacattcatatttctgattcccagagacctgtgtgaaaagctttttcagggtaagaggatgacttgaggtttctgtaggtgcatgaatgtatgatacaacattgatttttagaaacaaaatgcctctaatttattgtaaatttaatttatagcccagtcaattgagcaaagactgatgaaaatggaccacactgctattcacccacatctacttgatatgaaaattggtcaaggcaaatacgagcaagggttcttcccgaagttacagtcagatgtcttggccacaggaccagccaataacaagtaagcattcgttttacctgagtgatgagtttaatgaaagaaggtaattgttctccagtgttagccaggcagtgtgtgaacattaaatatcttacctattacgtctttaaatttaattattcctttgaaagcacttgacttttaattgttatgttaaaaaaaaattctaaagaccagggattttttttcacagaagtattaatagacacatttctttcttgtattcttttttttaatttgtgtttttgttactggtattgacagagtctcaataattaaaacagactaaactagaattcagtatataatcgaaggctggcatcaaatatatggtcttcgtcagcatcctttcctttttctttctttccttcttttcccccatcctatcccagtattgcagactgaacccatggctctgtaaccctatgccctgtttttttttttttttttatccttgaagtgctagaatcaaacccaagtacacagttaaatggctacattaaaacagtctggggtttgggttttttgtttgtttgtttgtttgtttgtttgggttttttgggatttttttggggggaggttcaaaacagggtttctctgtatagctttgaagcctgccctggaacttgctttgtagaccagactaccctcaaactcagagagataatgcctgcttctgtctcccaagtgctgggattaaaggcatttgccaccgcccagcttttttttttttttttttttttttttttttttaaggggggtttttttttttgtgtatttttttctcgcccttttaacagctctggctgtcttggaactagctcggtagaccaggctggcctcaaactcagagatccacctgcctctgcctcccaaatgctggggttaaatatgtgtacctccaccgcctggcaaaacactgtcttaatactaatcaggggtggtgactttgccagtaaccctgatagttgaaagggagacctagaaaaaaatttgaatttaaggacagcttgaacaacatagcaagtttgaagatagtgtagnnnnnnnnnnaccctgtgtcataaagcaaacagataaacactgaacttgaaactttgctaaaaaatgttggtgattatggggctcagtgtattcactttttaaaagatttatgtgtattggtattttgcctacatatatgttatatacaccatgtgcatgcctggtaccagtggtagctagaagagggcatcagatcccctagaactggagttaacagatgcttgtgagccactatgggtgctaggagccaaatccagttcttctgtgaggtcagtaagagtaactctgaggtttatgtttggtttttgtttgtttgtttgagacatgacctggtattcctggactagccccagactttcagttcagattgctctgaacttctttttcatatattttctatttattctttgagaattttatacacatatacaatatgttttgatcatatgcacccccttcttgttctccagcaatcccctcagtgctcctgattctctctctctctctctctctctctctctctctctctctctnnnnnnnnnnnnnnnnnnnnnnnnnnnnnnnnnnnnnnnnnnnnnncagccaattgccaattgctctccaggtagaaatggggcttcatgaaccctttctccatccgtgctgaaattctgaccatctggctcttgtgcaggcagccacacccactgtgagttcatttgtgtgatggccctgtcctggatggaaatcagtttcacaaccattctcctcaccctctgtctcctgcaatcttttcattccctcttttgcaacgatcccgagcctctcaggggcggggtgcagacaccactttagagctgaggacagctctcatcctcatacctctgtttctatctagagtgctagattgcagatgtgtggtacagcatctgacttacatgatgctggaggtgaaattaaaggtgttgtgcatgctaggtgagaactctaccaactgagctacatctgtctcccagggctcaagttttcttttcatttacttataaaatactctaactgtttgaattgctttgatataaatgagtacactgttggcctaacagtttttgtttccctttgataacattatggttttcgtctgtttggtaagtattggttgtgccattggtatataggattatcctggctaaagattgaacagtgaatccagcttggtggtacatacttgtaatcttagcatttgggtaactgaggaaaattcaaagccaatctgggctacatagaaagactgtttcagggataaaagaatttagcagtgaaatgaacataacagcaaacaataaaaaacattttcaagcacaagaaaacaaatcaggctggagagagaactcagaggttaagagcactggctgctctttcagaggttctgagttcaattcccagcaaccacatcgtggctcacagccatctgtaatgagatctggtgccctcttctgatgtgcaggcagaacactgtatacataataaataaatctttttaaaaaaagaaaaagaagcttctcagtttcaggaggtcccatttattaattgtggatctcagtgtctgagctactggtgttatgttcaggaagtggtctcctgnnnnnnnnnnnnnnnnnnnnnnnnnnnnnngggtatttcctattttctcttctaataagttcagtgtggctgggtttatgttgaggtctttgatccatttggacttaagttttgagcatgtcgatagacatggatctatctgcagtcttctacatgccagcatccagttatgtcagcaccattttttgaggatgctttctttattccattgtatagctttggcttctttgtccaaaattaggcgttcataggtgtgcagtttaatatcagggttttcaactcgatttcattggtctacctgtctatttttgtgccaataccaagctgttttcaggactatagcgctaatagagcttgaaatccaggatggtgatgcctctggaagttcttttattgtacaggcttgttttggctatcctgggtcttttgtttttccatataaagttagggagtggcactattaggaggtgtggccttgttggagtaggcatggctttgttagaagaggtatcttcctatggggtgggttttgaggtctcatatgctcaagctacactcagtgtgtcccacatttgcttctgctatgggcaaggaagcttctgcagcagtggtgtccatgattgcagactcataactgaggatgggagacattgaagcaacttctctcccaccagcactgccccccccccaaaaaaaagagacagttaagacagtgagctgttgaaaagagttctttaaaatttggtaaagatcctgaagtgtagctcttcacagttgatggcttatggtggaggggtgggaaaggactcgattttctttaagggactggccactgttagtttgactaggctccagtgactatataggcaacacaaattgaacttggtgtttttgtttttgtttttttggggggagggcagcgggctcagatcatagacatcaacatagtttctggcagcagcacagatcatgggcatcagcgttgcctccagtggcatcatggaccatggaagtctttcaaggagacttgatccagaaaaggaaccattcttcatcttgggtatcttgttgctcagagtcagggtgatggtgaagttgggcagcattaccggggacaagacctgtgctggctgcaggcttgtgtactcccccccgccctggtaccagcctccccccgggtaccccaggcatgagcatcgtgtttccagcctgtggatactatggccctgtgctctccttgtgtcaaggtgagcagccattccatgctgcaggtggcaccagcctagcagacagcaatgaggcaatgtagacaggtgggtggcctgagcctcgcagaggcccaaacaccagtcctacatggcagcaatgtgctcctttgtctgctctagggacagactctcattcctgttgctgccattgcatctccaaacctgcttctctcagtcatctttctgtctctccactgcacattcatttactaaagtgacatttcaatctgccgnnnnnnnnnnngttactttgcccaaacagctttacatgcagacacttaatgcattgagtcattgaactggttcaaggtttctgaggcaccataaatactggaatattggtgagactcatccctggtatcctgttgtcaagagtcagggagattgtacagctgggnnnnnnnnnnnnnnnnnnnnnnnnnnnnnnnnnnnnnnnnnnnnnnnnnnnnnnnnnnnnnnnnnnnnnnnnnnnnnnnnnnnnnnnnnnnnnnnnnnnnnnnnnnnnnnnnnnnnnnnnnnnnnnnnnnnnnnnnnnnnnnnnnnnnnnnnnnnnnnnnnnnnnnnnnnnnnnnnnnnnnnnnnnnnnnnnnnnnnnnnnnnnnnnnnnnnnnnnnnnnnnnnnnnnnnnnnnnnnnnnnnnnnnnnnnnnnnnnnnnnnnnnnnnnnnnnnnnnnnnnnnnnnnnnnnnnnnnnnnnnnnnnnnnnnnnnnnnnnnnnnnnnnnnnnnnnnnnnnnnnnnnnnnnnnnnnnnnnnnnnnnnnnnnnnnnnnnnnnnnnnnnnnnnnnnnnnnnnnnnnnnnnnnnnnnnnnnnnnnnnnnnnnnnnnnnnnnnnnnnnnnnnnnnnnnnnnnnnnnnnnnnnnnnnnnnnnnnnnnnnnnnnnnnnnnnnnnnnnnnnnnnnnnnnnnnnnnnnnnnnnnnnnnnnnnnnnnnnnnnnnnnnnnnnnnnnnnnnnnnnnnnnnnnnnnnnnnnnnnnnnnnnnnnnnnnnnnnnnnnnnnnnnnnnnnnnnnnnnnnnnnnnnnnnnnnnnnnnnnnnnnnnnnnnnnnnnnnnnnnnnnnnnnnnnnnnnnnnnnnnnnnnnnnnnnnnnnnnnnnnnnnnnnnnnnnnnnnnnnnnnnnnnnnnnnnnnnnnnnnnnnnnnnnnnnnnnnnnnnnnnnnnnnnnnnnnnnnnnnnnnnnnnnnnnnnnnnnnnnnnnnnnnnnnnnnnnnnnnnnnnnnnnnnnnnnnnnnnnnnnnnnnnnnnnnnnnnnnnnnnnnnnnnnnnnnnnnnnnnnnnnnnnnnnnnnnnnnnnnnnnnnnnnnnnnnnnnnnnnnnnnnnnnnnnnnnnnnnnnnnnnnnnnnnnnnnnnnnnnnnnnnnnnnnnnnnnnnnnnnnnnnnnnnnnnnnnnnnnnnnnnnnnnnnnnnnnnnnnnnnnnnnnnnnnnnnnnnnnnnnnnnnnnnnnnnnnnnnnnnnnnnnnnnnnnnnnnnnnnnnnnnnnnnnnnnnnnnnnnnnnnnnnnnnnnnnnnnnnnnnnnntgaaaacataattaaataggatatttttgcccccacatagcatatttatattttttcatataattagtgtttatttgtaccaccctgcctattaaccctaatttgttttgggatgaggagttcagacttttggttggttggtcagttggttggttggtgggttgcttggatgatttagtttggggtttattgagaccaagtcttaccaaggagctcaggatggcctacaatacactgtcccccttgtctctacctcccaagagttggggctataaacatgtacctccatgctcagatgaacccgaatttgtcagtccctgtgaaatttgtgctaactatctttatggcagtaccgttttccagttttaaattacattatttgggggttttcacacatgccatggtgcacatcagaaaccagagggcagcgtttgggactcagccttctcacttcagcaggcttggaggcaagctccttttcccacgcactattttcaaggtctctgtgccaaagatctacccttgggtctttttacatttttctctgttaatttaagttctatctattgtaagctatttgtgccatgtagtttttatgagaataagctgtagaaattacattttgtgttgtattgagcagttaagcggtagcacttgagagtaaagtctgttgagagctgataaagggcatatggaggtattcgtgtcctaaagggaagcaggtcctggtgtggtgtgaaaccaaggagtcaaggacagttttcccaggatttggggctctgctcagcaaggttggaaggaagagaattgttaaaaggaaaggacatcacttctggagtactttgtatgattttcttgggtcttgggccagaattgaaagaaaaaggagcacaaaaggtatggaagagctaatgtaacaggagatagacattcacacattagatggaaatgtttcagatttctgaggtccaggactagagagatggctcagctgttaaaagcactggctgcccttccagaggacctgggtttagttcccagcatcctcatggcagcttacagttgtctgtaactccagttccagaggctccagtaccctcacacagacatacatgcaggcagaacacggatgcacataaaagaaaaatttctaaaacaaacaagttttttcataaaacatcttataggccaccatttcatagaaacacaatcatataattttagagcccagaataatcatatcctacctccctgacacaaaagagccttaagtttagaaagacctccctttaaaaacgtaacaatcaagcatggagagatggtttagtgattaagagcacatattattgcttttgcagaggacccagcgtggtccctgacctcagttttttaaaagtattaattgtggggatggttgtgactatccaaaatccattagattgactgctttgatgggtaaattaaatgtcatctaaaattataactttaagcatattttgaaaagaattggttgaaagaactgagtgtggtggcacgggtgatttcaaggccagaccagagagcaggagactgaagaagaaacaagggaaggagagaggaaaacggctactgctagccatttgtgcagaacgattcactctttctggttccttgtttcgttttgctttgctttttgtcgttgttttggagaaggttggtgttttgggggggttttgtttgtttgtttgtttgttttgtgattgggtttttctatatagccctggctgttctggaactcactctgtagaacaggctggcctcaaactcacagatcctcctgcctcttgtgctgggattacaggcgtgtgccaccaacacccagaccattctttctgttttgtctttttatttggctgattttcttaatctatattgtctccatatatttatttgccagtcgctgggtgagtcgaagtgccacagcacagcgccggaaagagcgccttcgccagcattctgaacacattggactggacaatgacatacgggaggtatgtggtcggactgcctgggatgccacaatgcagagatcagaaaactcacccaggaggtgttaggatctttcaaggtcttttaaaaacagttcctcttattttaaaatactatttttatactaaaatgtagcagaaagcatttttccagtcttgtccttttattcatctacaatagggctttatgtctgtgtattaaatctaatagatgctttatttagggtaaacattttgttgttgttggggttttgttgttgttgttttttgagacagggtttctctgtgtggctttggagcctgtcctggcactcactctgtggaccaagctggcctccgaactcagagagacccacctgcctctgcctcccgagtgctgggattaaaggcatgctttatttagggtaaacttttggtcagtaggtctcctgaaggtagaaacattgagatacacatatatctaagtttcacatattatttaagataaagtaacacattctttggcttttggcttttggcttttggattgctgatgccattttttagaggcaccagagctgttttttagactaaaatctatatgctttatttgtattcattgaaaataaaattcaaattacgttttagtaattatattttatttcttgtgataaaaagaaaagttggaacaaaaatcttcataactgttttgtaaactcagatgggtagaaatacaatagaaaacaccattccagaccgaagcctttcttcttgttcattgtctttccttcactcccctccccatgctgtggtcctatcatgtgcatgcaggttttgcttctctttcttttttccccccttgtttacttctctgtcattgaaatgtcgtcatcatcttagccttccgggggacttttggtctgtcagaactccatggcattctgggagtgggatcagggcccaactcctcccgcacggcttcctaaaaagtccttctctgagtgctgcctggtatgtccttggccttgaaagtgcttcacaagatattcctgaatcttgctacttggtgtttcttgaatggcccacacctatgagtgcatgtagcatgttttgctctttgtttgctgcctgtttgtgctggcatgtgcttgcataagtaattttatgctgttgacagtaaaactgacattcaagtcctgagtcattgaggggtatgtgtgtatgtatacatgtgtatatatgtatgtatatatgtatgaagaacctcgataacaaattacttttcttttaaatgggagagaaatgtatgataaatcctttatattttaaggatttcttttcacaagtgcagaagtagctgaatatcagcttttattagatatttgtcttcataccattttaatttacttttcctggtctacattttgtttcagaaaactcactcatcatcatagaatactagtgctaagaggaggaacctttgaggttgtcttgtctagcttgacattttagctgacaagcaagaaatttgcccacagttaaatggacatacacagcagagctgagcctgtagcacaggactcctaatgtccaggctcaagtgtcttcccactaatcatgctgtaaccactgctcacctgaggacacaaatagtctaggactctggcttaactttttctctgttatgtcattagtttacatttacagcagtcttcctttccagtgagttagcaccaactaaaaggtcagaatataatataatatatattattatgtaatatataatataataagctattacaaaattgtggggaaggctatattaaagagcaattatttctaaaaatcagtgtttattgaacaagattgcaatttaatacatatttcctagtggcttattgcttctttttttcggtggggggcggtttctgggtttgtgtacttgttttgtttttattttgagacagggtatcaaccatgtaactctggctagcctggaactcacagagattggtatgcccctgccccccaagatctgggattaaaggtgtgcaccactacacccaactgttttattgtttttgctgtgtgtatgggtgttcacatctgcctgtctgtctgtctgaggatgtgaatgccacctgagtataatgccctcagagtacattgcatctcttgtagctagagttacagttgcttgtgaaccgcctgaagtgggtgctaggaaccaaattcaggtcctctccaagagtaataacctccgtttgcttttgtattgagacagggtccgtgtatcctagcctgacataaactggcatgtatttaaggctgatcttgaacttctgatcctccttttccacccccaaagtactgggattaaagacagcatcactatacccagtttggtttgtttttaataataataataataataataataatattgttaattgcagtggtggtggttttatgaggcagggtctcactatggacatgtgaccatcttgaagctccctgtgtagaccaggcaggcctccaatttaacagaaatcagcttaccttggcctccctagtgctgggattaaaggtgtataccacctcacctggcctttatatttcttttaaattatgttcatgtgtgtggggctatgtgtacttaagtacaggtgcctgtggaagccagagacatcacatactcctagagctggagttaactgagctccctgatgtgggtgctggaaaccgaactcaagtcccctgcaaaatcagcacacactcgattcctctgagcatctgtccaaccccaccacacccagtgtttatatggtgctgggaattaaaccagggttttgtatatgatagtcaggcactctacagttgaactatatccccagtgggaaagctctttcaacattaaaaatttattttcacccatctttatatctagcttttaattctgtccccaaataacaatagaaaatgaaaatgtaatccccatatcgatgctgccttgtagctcagattgatttttctaaaagtgcttttatttcctacatttacttatttgaaaattgacttttgacaggtggtgtagcatgcctttaatcccaatgctcaggaggcagaggcaggtctctgtgagttctaggccagcctattctcagaaagtctcaggacaggctccaaagctacacagagaaacactgtcttgaaaacaaaaaaagaacgggttcctgtgcccactgctacatttaatgtccctgctgataatagttttctcattctcagtttttcatttttatttttcctttgaatactatttatttaaagtggaaacatacatgtaagtgctgaagtaactgttacatggagaactcatttgctgtttcagtggttccttaaaattattagactgaaaaaaattattagaccgagaacaagccatatcatcttgttaatgttaccttttgtcatgaacattgagagaaactaatcacttggtcgttaatcagtggaacttttggcagctttagtgggtctattttcttccaaaggggaaacagattctcttacatttaaagagttcaaaggattttacacatcttattttatagtatcaaattctccccttaagataataagaatagatttacacctatgcccgtgaatgtgtcaattcactagcacgcagtctccctcaacaaaatgctagttttgctgtacgatttagagcagttcttcaaaatgtagtcttaagacacacatcttttggagattctgccttgtaatcttcatgccaagcacttgatgaggttcttcaggcagtggagaagcacagagaacatagttctgtgctgatgaggtgtgtgggggcctcttttgagatgtgctcttgagtaacctagcctgacctcaaacttttctatgtgaccttgaaaactgtctctctctctctctctctctctctctctgtgtgtgtgtgtgtgtgtgtgtgtgtgtgtgtgtgtgtgtgtgtgtgtgtgtgtgtgtttgttaccacaaagtcagcagaggactctgggcataaaagtaaggattgtagaacaaggaaaggaaggaagggttttttgttttgtttttcattttttggtgcaagggaaggttttgtgtgaacatctcagtagagtcatcccagctcccatacctggagcccatcatgattttcagtcttttctgtgaactgtatagcatggaccatacagtgacatgcagcaacattagacattcgatgatacgatcattagctacaacacaattttggtactatttaaagttaattagagccaaggatttggctggagagcagtgccccagatgattgacagacttgaagtctctgttgagagaagtagaacagaggaagccagtgacctgagaaccactctgtttctgtggaacctcagactagactagacacctaatttttttttgctcttatcttgatcccaactaatcataaggttggtggccccactaaaaagactaaactcaatgaaactcctgattttgaatgaatttcaacttaatgcttctgtcacagcccttttcacaagagttaactggtttggggaggaatacacgtgttctctgccttctatcaatcaccgaaatcttaattgctgttgcccacgtacacttacggccttttgtacaacctgcctgttgtatttattcatataagttttaagtagaaaataatatgtgatgtttatacatttaaaatactcctgatttttagaaatacatgcaagaggcacgaagcttaggaaaaaacatgagacaaccaaaactgtcagatctctcacctgctgtgattgcacagaccaactggaaatttgtagaaggcttattgaaagaatgcagaatgaaggtatgtatcctgcccccagacagtgtgcattcgtatgtataccctgtgtggatctaagacgaggtaagtcaactcccatttgtgcctgtaacttctctgaaaaaaaaaaaagttcattatttcatttttttatgagtatgggtgttttgcctgtatccatgtctgtgtgccacatgtgggcagtgcccatgaaggccaaaagaggacatcagatcctctgggattggcattacagatggttatgagctaccgtgtgggtgttgggaatcaaacccaggtcttctgcaggaccagccagtgctgttaacccctgagtcacctctccaagcttcaaaagaaacattttttgtaacatagacctgataatgctcttcactgaagtcatgaacctccatgaagtctcacagcccacagcatcaatgacatgggagcattgcatagtttttcatatttttttaactattgtatgatgtatggtgtgtgtgtgtaggcacacatgtgcaagtcagaggacagcttagcaaagtcagttcttaccatctacctccttttaggcagcgttttttttgtttttcgtttgtttgtttttttgtttgtttgtttgttgccatcactatggctgtttgaaaatggcaggcccatgaacttcatctcaaatctcacatagtagcgttgagattgggggcatgtgccgccttacccagcttttacatggttcccgggatctgaactcaggtggtcaggcttgtacagcaagcacttttacttacaaactatctccctagcccttagctggagtcttcctcttcagtatgatgtgaagccattcatgagttatataaagaatgttgctctcttatgtgaaaagcagtgtgtatacctgtgtaaagccttgcttgtgcccatacatgttatcacatgtgcccaagggaaaggatcttaactatggtataggtcagtgagtattaaatatcattcttctctcacagaactgcctttatacagggtagccatatgaatgaaaaacctcagtaacttgtgagcatattcaataaaagtactgttttcagtgtcagtgtgtacaggtaattagacaaggtactacctagaggagctgtagctttctcactttgcctgtgcaagactagctaaggtagatgtgaattaatttacctgaaactggttttcattttctgatacatccttgtgagcaagtaagagaaaaaagggggagatggtgagaaccctagttcactcacaaactaggaagttctcaaaaaaaaaaaaaaaaaaaagggaagaaagaaaaccatagagctactcatttctattgtggctttgggttaagtacagaaagctttagtgtgtcaagatgccagagtcagtaaaggtcagcttgtagtgacggaatgaggttcttgtgtcagaagatgccttttctaaattcaagacaattccagaagctttaggacaattatactgttacagaagtcaatagattatgggtttttttttttttcaacattaccatgccttacaaatactattgtttcattagtgccctaacatttctctgaagtaatagtaaaatatagaagatattactccaaccagctgaccaccagattaagatattttctccatggtgcctgaaatctgttatcagaattgtaatgaagggaagcagatctccctaaactagtaattgatttccttggttttgagtttccttgctgtggtaacttatgaccggtcatattgttttcagacaaaacgcatgttggtagaaaagatggggcatgaagcagtagaactgggccatggagaagccaacatcactggcttggaagagaacaccttgatcgccagcctctgtgacctactggagaggatatggagccatggcttacaggtcaagcaggtaaccaactcaagaggcaccggtggcacggctgattcaagggcttattcatgccaagggactggactgttcagggtggcactcgggaagcaaagcaggtggatctctgtgactttgaggctagcctggtctacagagtgagaccctatcctaaaataaggaaagaaggccaggtggcggcggcggcgcacacctttaatctcagcactcgggaggcagagacaggcaacctggtctacagagctagctccatgatagccagggttacatagagaccttgtctcaaagaaaaaaagggaaggaaggaaagaagcaaagatgaaggatgaggctggcaagactgctcagcaccaagcctgacaatatgagtttgatctctggaacccacctcatagaagggaaagagacattcacacgaatgagaaatgtgacaagaaaaagaccccacaagataatgaaatatatatcacagactgtttggttccagcaaaagaaacaatctgggctagatgtggtagcacacacctttaatctcagtgcttgggaggcagagagaaaggtggttttgatgagaatattttgtgataaatgtttctttaaagtgaacgttttgtgtttcttgtgctttcaggggaagtctgccttgtggtcacatttaattcagtttcaggaccgagaggagaagcaagagcacctcacagattcaccaggtaagaaggcgttggagtaagatagattgcttcaagtctcgtgtatcctgggctaaccctgtactcttgatctttctgccttcacctccgaagtgctaggattataggcatggaccaccaacctagcttgagatagattggtttgatagagtgggcagtatgaggcaaaaagaagaatcagtgtaggtgggtacatctcaatctaaaatttacccacgttgccaataaggataaagcagaaggagcaataatacaagatattaatctaaggaagctcacttgaccctatcttctgtcctctcactgtaagacagagaaaatgatagtagctatccagagtgatcacgttgatataaaggaacaaacacaattaattgtgaagaacattacaggtatatggtatatactgttgttattgttattttatcattattgttattgaaaannnnnnnnnnnnnnnnnnnnnnnnnnnnnnnnnnnnnnnnnnnnnnnnnnnnnnnnnnnnnnnnnnnnnnnnnnnnnnnnnnnnnnnnnnnnnnnnnnnnnnaaaaaacaaagaaaaaccctgcctcgaaaaaaaaaaaaaaaaaaaaaaaagaaaaagttttgtgaccttcaataatatctttttttttttaattggtttttcatgacagggattctctgtgtagtcctgtctgtcctggagctcacgctgtagaccaggctggccacgaactcagagatctgccagcctcttcctcccaagtgctaggattaaaggcatgtgccgccaccaccctgcaataatcttaatatcttctaatacatcttatttaatttttttaatgtgggcatgtgcatgtggaggtcaaatgacagcttgcaggtgtcatttgtctccttccactttgtgggaactgagaatttggttctggttgctcctcggtttggtggtgggtgcctttatcactgctctcactatccttcctttctttctttctttctttctttctttctttctttctttctttctttctttctttcataatgtcaggatcaaatcctgggccttgtatttataaataaactttcaggaaaaattacatattcatctccaagactatttaagagtcagagtctttggcttggctcctttccttctttttgagatagggatcttacttggatgctcaggctgacctcaaactttgtgtggattccaccttagctccacctgtagctgggactacaggcgtgtatcaccacactcaacttaggagacagattcttcagtttatannnnnnnnnnggcataattctcctgctaatcagaattatacaggattccttatgtcaaataatacaactattacattattttttttacctcaaagagtttgtttgttttttttattggcagtgctgagggtcagacccagggcatcagccactgagtcatgtccacagcccagagcttggttttctttatgtaagataaccatctatttcataaaatataaaattaacagtaggaagttaacagaaataaaatgtttgggtgggatagggcagagcttggctgtaatctcagtactcagnnnnnnnnnnnnnnnnnnnnnnnnnnnnnnnnnnnnnnnnnnncttatccccccaaaaaaaaacctgaaagggaataatgcaagattttatactgaattagccatttaggaaccactttttaaattataaattctttaaaaaattcaaaaataaaagatttttttttaaaaaaaaatgtttttgagacatgatctcactgtgtagctctggctgacctggaacccaccatgtagaccaagctggccttgacctcacagagatccccctgcctctgccttcagaatgctgggatcaaagacattggccactatactcagctgtaagagtctgtggtatggctcagagagcaaagattcctctgccaactctgaaaacctgggcttgatccccagagttcatatggtaggagaaaatgccataaaattaccttttgacctccacctggagaccatagaacgtacgtgtgtgtgtgtgtgtgtgtgtgtgtgtgtgtgtgtgtgtgtgtgtgtgtgtgttattcacataaactaaccaccaacttaataagtaaaactaagtaaaacatagccggttaaggatgtatctcagtggaagaatactcactagcaagtgtgaaaccctgagttcaatccccagtactgaaaaatagatagatagatagatagatagatagatagatagatagatagatagaacaaatgaaagaagggatacccttgtattcatctccaattccttttcctatccctacccaaggtagcattatcctacagagtttacttgtaaaaaaaaaaaaatcattttcaatgtatcttataagataacaggaatatggatttgatactacattgccctggaactcctcaatagcttgtcggtgtcctaaggcctttgccataactatatttatactaagttagatttaggtctctaatacccacctcttcttccatttttgctatatagaaagtaaaagtacattggtctatgtcctgtatctaacaggaattgtagccattggtaatgaaaaccacgtaagaaagatagcttatctaaatttcatttgattataactagaaggccagtaagtggttagagaaagcagagttgagagtagtggtcaccccaaccctatggtaagggtcaagagttgcaggccatccctggtatgtgtattagaccctgtctcaaaagagaataagttcttaagaagtagctattcatggggtaaaatgttggaaagccaagttcaattaagatgggacagatgcattcaactctgatgcccagaaaggcacatgagaatgttcagctgctgttgggcaacacacgcagctcttgtggttttcactggccaaaagttgagtggttcagttagaaatcaaactcctgactgtcttcagtggcctccagcaaattctaaagtgcaagataaatgaaagtgtgtcgaagatctatacagttacagtctctgccacactgtcaaatcgatgaagggctaatgatgtaagagcaaacagtattttagtgttctcagtaagattaatgacagccatgtaacttttttctttttcagagtctcattataaggctcttgtctggcctggaactccctatgtagatctggctgtcttcaaccttacagagatctgataacctctgcttccccaagtgatgggattaaaggcaggcaccagcacttgcccagcataactaattttttttttaattatatgattgtatgtgtgtaaatgtctttggaggccagaagagggcatcatgactcctaaacatatagctacaggtggatatgggctgcccaacatgagtgatgggaccaaatttggagtcctttgcaagggcaatacatactgataaagctgagccatctcaccagccctaagccgtagagaatttgaagtctgtgtttattgtttcaatggaaaggaggcagaggcaggcgaatcttggtgagtttgaggtcagcctggtctacaaattgagttccaggacggccaggaccattacacagaaaaacctgtcttgaaaaacaaaaacaaaagttttaaacttaaaaatgcatggcagagtaacatcacctacttcagggctgccggggaacagaggtaggacaaactataccattccattgcatgctgtctgtgacctgcttgatccctgtaggcccaagacagagtacacccttaaagggcacacacactcagtgacctacttgatcaatgtgggccccagattctcatctctgccacctcccaatgccgtcagactgtaagtccatcagtgaatctttgtactgattaggctagagtccagatgattcagtcacctcccaaatgttgtgccacgtgtgaacattatattaggaaccaaatcgtaaacacagttttgggaggtgcatttcccatccacattaacagtccctttccctataagacactgttgtggaagctgcagctgtactaaagactctatcttcattgcttaatttattggttttggtgagaggggttgtacccaggcctcacgagcactgtatcgctgagctgtacctctaggccacctgctgactatgggcatctcctctggctccttgtttccctctagacaacttgctgactgtagtgtcaactcttttcctctgcttcatagttttctcccgcttctcagggttttgttttgaggttattattctcttcagttttgtttgttgaggcagaatttcccatcgacaaagatgaccttgaactcctgatcctgctgcctccactttgcaaatgctggaatacaggttgtgtgccactatattccttactatttgtgtgggtgcatttatgttgccatgtggaatgaagagtcattctcgaagccatttgactttccacccccgaagaatggcacactttaataacacacttaaactaagatggtcttgataggaagataaacatatttcctgcaggtgtctaagacaatttcctcactgtgcattacttccctgagtatccaaaagagattagtctttaaagtcccagtttgaaaattaccttccctaagccagatgttgtggcacactcacttaatcccagcacttggaaggaagaagcaggtggatccatgtgagttcaagggtggcctggtctacagagcgagttctaggatagtcaggctatgtagagagaccctgtctcagaggaagaaaatgaaaaaagttccctccctaatctgcctcctgaccgccatctagagcctccgtgtcagtcccataagtgatcatttatatctactagacacgagtccagctttttcaccaaacaccaaaaacataaagatctaatactctgagattttcactgacccttccttggcagcatgggcaggagagaagcatcttccagtatcacaccctggcttgtcaacatcagtggatctaaaacctgagaaaaaaatagctatgatataaagcaaaatccactttctaagttccatcagtatatttgctaaaggtggtgcttcagttcagtttccatttacagaagagaaaatggaaatgaagaaggggtgcaaaatgccatcgcatctcaccaaaagtgagaccaaacatctgtctccacttcatagccagtggctgtgtgctcgatgcttcctgtaagagtcattttccttcttttataaacattagctgtggaactggagagagagctcagtggttcagagcagttgttgctcttgtagaggacctggatttgatttccaggatccacctgatggttcccagccatccttatctccagtgccaggggacttgataccctcttctcctgtccatggaccaaacacatgccaaacatgcttgtggtatttaaacgttaatgtgaaataaacatggcatttaatttattaaaaattactcaccgagcatgattgtacatatctttaatcttagcatttgagaggccagtagatccatgtgaattgagccatcctagactacatagtgagttccagaacagtcaagtacagggtgcaaacctgtctcaaaattaaaaagaaaaaagaagaaaaggaaagaaaaccattcatgtatcttatgcttttgaaagccaatttaaataactcactttgcatgatgtgcataatgtagttaggattctgaactttgaaggaggaatttaccagcctaaagagccagagcagttatattaaatgcaaaataataataaaatttaataaaagaaaaaagctgggcatggtggcacacccttttaaacctaacccttggaaggcagaggcaggcctggtctaaaaagcaagttccagaacagccagggccattacacagagaaaccttatctcaaaaaaaaaaaaaaaaagaaaagacaaaaaagccttccaaagtttaaacattaaatgtttttctgtgccaatgatgttctgggtccaatccccagaatcacatgaacagggtgtagtatcacatgcatgttatcctagcattcaggataagaaaacagcagtgggtacatgaggcaaaaagccataaataggtttccagttcataaatctgaagatgaaggctcacatacctcatagcttaacttctcaacattgcctttgagtaattacccagcacgatgagaacaaatgaatagctaaatggctggccctcatggccatattttacatatattgcattatttagaagatgtactttcataaaatacttgttttaaatttccaaatatagccacagcttgtttagaaagaacatacctgtttactgtattaataaattattgatactaaatggtcagccctaaagacatacacacaagtaacagtgtgcagacagagcaggttgtcttatgtgtttagaaatatatatacatacacatattcaatgacaaagaaaaggagaccatgtggggaatggagggtacatatgggagggcttagggggaggaaagggaagagggaaatgatatattattattataatctcagaaattctttttttgggttttttgagacaggatttctctgtatgtagcattgtctgtcctggaacttgctctgtagaccaggctggcctcgaactctcggagatcctcctgtctctgcctcccaagttctgggattaaaggtgtgcaccaccatcaccacccagaaatctcagaatttttaaaaaaattattttaagaatgtatcaataggccaaacatggtgatacaccctttcaatcccaacattggggaggcagaggcagtggagctctgtgagttcaaggccagccagggttacacagaaagacctgttttgaaaaaaaaatttttaagtataaatttttactgttattttcctaatactttgctaatatttttctacatagttgcccttggaccagaaagaagaaaatctgactcaggagttatgttaccaacactcagggtctcccttattcaagacatgaggtatttgttacacgttaacgaatgtcggtaactatgaggtgtagctttcacctgagttgctcaagtgattataaccataccttttgtttacatatcctgaagaaagtattttcataattataaatatgggttttttaatttatttaattttagtttatattatgagtattagtgttggacctacatttacacatacacaaaccatatgcgtgcctggtgcccacagagttcagaggagagggaactagatctcttgaaaccagagttagggatggttgcaagctaccatctgggcactgaaaactgagcctgagtgaagagcaataagtgtttttaactgcacagccatctctccagcctacattttaattgcttactattgtgctgttttgttgttggctttttttttttttttttttacattaaatagaaaggggcagttggggaagagctttctataaaacagctataaactgtaatttctctttgatgcatctcttaaatgcatgctatctatagatatgcagacaaaaaatatagatgacaacaggtggcttagcagaaaaaatgctctcagaatgatacaatttttctttttatgtttatttgtttgtttttccagacagggtttctttgtggaaccctggctgtcctgagactcactctatagatcaggttggcctccaactcagagatcaacctgccaagttctgggactaaaggtgtgtgtgccaccactgcctaataagatacagctttaaaaatacaaatattaaaattaacatttcttgccagggagtggtggcacatgcctttaatcccagcacctgggaggcagaggcaagtggaaggtagaggaggcaggcaggtaggtctctgtgagttcaaggccaaccatggctgttacaatacagaggaactctgtctcaaagcaaaacaaacaaaaaagaatgaatggaaaaggttacacttttttcttataaacattttaagcacaatatttagtcactatttaagatatcagagttcaaaatgtgtgtacataaaatataaaataactgtaacacttatgactttttgttccggggctagggagatggctcagcagttaagagcattggctggtattctagaattgagcccagattcaattcccagaactcagatggcagctcacaactatctataactgtagttctaagggatcctcacacagacatacatgcttgcaaaacaccaatgcacataaaaataaattttgaaaaaagaaaaagaaaagaaggggaaaaaaagacttgtgtcttttgtggtggcgtgagtctttgacctcaacacttggaagcagaagcagaggatctctgtgagtttgagaccagcctggtctatataatgagttccaggatagccaaggctgaattaaagagactctgtcttaaaacagacaattacaactttcctttaaatgtgtattttgttggtatagtttgtatgtgtgttcatatatgtgtgagctcgtgcgtgcgtgcgtgcgtgcgtgcgtgcaggnnnnnnnnnnnnnnnnnnnnnnnnccaaaggacaacttatgtcttttcttaagtgctgtccacattggtttttgatacaagttctttcattgccatagacttggccaattgggctagttgggctagttagaaagctcctcctatctctgtctcccaagcacaagaattataagcacctcattttatgttttgtgtggtgtgtgtgtgtgtgtgtgtgtgtgtgtgtgtgtgtgtgtgtgtgtgtgtgtgtgtgtatatggatgtttctctccctcccaccagttccaagtacccaaattaccacacagaaacatattacttataaatactcaactgatagctcaggcttattactcactaactcttacacttaaattaacccataactcttatcaatgtttagccatgtggcttggtaccttttctcaatatggcattcttatcttgtttctctgcatttgccagtgactttcttgactctgcccctcctcatcttagtctggctctcacactcaacctcttcctgcccagctatcaaccaatcagcttttatttaataataagtataatccacggtgtgtgtgtgtgtgtgtgtgtgtgtgtgtgtgtgttgtaatgagtcacactaacaaagacttttcactagagttagtttttactatttaccttgtcttctttttctgatcttccctttctctgctgggaggaaaattgcttaagaaaataaattattcatttctcctggatccagcagtgacttctatatagaattctaatttatacatatatattgcattcacttgctattggtcacacaattttctaagtcccttttcacattttaagacttatcaccactttgccaggtgtggtgccacagcagcaggtgaatttctatgagttctaggctagtctgatctgcatagcaagtactaagacagccaggactacataaacagaccctgtctcccaaacacagacaaataaatcaacatagtactgcttatctcctctaatactgtataaagtaactaaagcagttacttcaaataaaccaggcattggtggtgcacgcctttaaccccagcactctggaagtagaggcaggcagatctcttgagttagaggcccacctggtctacaaagagttccaggacaggcaaggctatacagagaaaccctttctcaaaaaacaaaacaagacaaacaaaaaaatatatcacccaagccagtcgtggtgcaatatgcatttaatcccagctcttaggaggcaaatggatcagtgtgttggaggccaacctggtctgtatgatgagttccaggccagccatggctacatagcaagactctgtctcaaaaactaaacaacaactacaaccaaaagaaaaaaaaaaaaaagagggctgaagagatggctcagaggttaagagcactgactgctcttccagaggtcctgagttcaattcccagcaaccacatggtggctcacaaccatccattatgagatctgatgccctcttctggtgtgaagatatacatggaagcagaatgttgtatacataataaataaaatcttaaaaaaaaaaaaaaggacattgtgtattacccatttcttcatctaaatacaaaaacttttcttggtccagcattgttaatactttttaagctcttttccagcttaaagttatccttaaaaacctctcctagtctactgtgactggggcgaaagagcaaactaagcacatccttgctaatttcaatagttaccagttttgttttggtttttttgtgaaaacatgaatctagatggcgtggttgctctcttagactactgttgagatggcgtgattctataagtgactttctttaaggataatttaggaatgggaaaatgttaacaaattggaaagttatttttgatctgtcaccttcaccatgacttgctattgcttgtcatccatgcaacaccaggacttaggacaaagaggactaagctgggtggtgatggcaccatgcctttatttccatcatttgggaggcagaagcaggttgatctctctgagttcacaggccagcctggtctacagagtgagttccaggacagccagggctacagagaaaccatgtatcaaaccacacttatctcctccacaaaaaaaaaaaaaaaagacaaaggggactgatgtcattttgagtttttattttgactgtgatttatttgaatcagatgtattattttaagggaaaaaaaacatttcatataggttgtctaaaaacaagatgtatttaaatgcaaaaaaaatttctttcttgttggtactgatttttaggcatattcagaacatgagtgagatcaagactgatgttggccgagcccgggcatggataagattgtctctagaaaagaagcttttatcacagcacctcaagcagctgctctctaaccaactgctcaccaagtaagactcttgtctctcacgatatttgttcctgtgattcgtgcttacaaaggaaattaagtaagctgatgaactagcaccttcatcatgaatcctgattaatgagcacatacatttttgtataacaggtgtgcttcagaaaataacctttgtgaggctggactcagaggcactggctgagttcagttcccagcaaccacgtggtggctcacaaccatctctactgggatctggggccctcttctggtatgcaaccagaaccttgtatacattaataaatcttcaaaaaagaaagaaagaaagacctttgtagaatatttgatcatttctgagagggcacaccagatttaatagctaagaccagattactgttctgtaatcagaaaaataaatgctcactagtccacacaagctgacactaggttgaacttacattagcttcattgcataaaactcagcaagaagttgctgcagagcactaagaggcaggtggatctctgtgagtttgagggcagcctagtcctcaaagcgagttccatgacagatgggtctacaccgaggaactctgtaagaaaaggaaaaaagaaaagaaaagaaaaaagttggtgcaagatatttgatcacactgtgaacactgagattgtgttatttactggaaaaccctgtttctgcctgtagcatgcacctttaatccaagagctttctgcttgaatattgtaagcaggattaaacagaatcaaccttatgtcaagaggtggagcaagcaaccagtggacaggaaagaaccatagagaatgagggagttggaaggatggggagagatgtgcaggaagtagaaaggagggacatcccattggaggagtttattttttgttttgttttaggtagtgtaagagaaagctgtctttctgggacagcagtggaggaggaaggccagctgggtgctttctctgcctttctgagctagcagagtttcaccccagcatgtggctcctgactttttattgctgaaatggaacaatagaaatttagtttaaaacaagtagactagggctggagagatggctcagtgtttaagagcactgcctgctcgtccaaagatcctgagttcaattcccagcaaccacatggtggctcacaaccatctgtaatgaaatctggtgccctcttctggcctgcagacaaacatgcaggcagaacactgtgtacataataagtaaataaatgtttaaaaacacaaaacaaaacaagtagattagaagaacagaaagatggagtctttctaatagacttttaatagtttagattcagggaaccagttgcttacaagtcagttaattgttacccagtcagatagtttctgtccttacccaaaagaaacaaaaaacaaaaagcatttatttttttattctggagctacataaagtctcactatgtagttctagctgccctgaatctcactatgtagaccaagctggcctcaaactcatggagatttacctgcttctgcctcctgagtgatgggattaaagatgtgtgcctccaagcctggcaagaaatccttctaaatgataggacattagaacttacttgaaagctaagcagttagaattctcaagagtaaaggtgtggtagcacctttaatcccagcttggcgtagtgtgtctcaggagtggtgaatccccagagctcatttgacctgccattctagctgaaccaatgaactccaggtctgatgagaaacgctttcaagaatgaatgaatgagccgtaccttggtggctcacacctttaatcccagcactcgggaggcagaggcagatggatctctgtaagtttgagaccagcctggtctacaagagctagttccaagacagcctccaaagccacagagaaaccttgtctcgaaaaaccaaaaaccaaaaacaacaacaacaacaacaacaagaatgaatgaatgaatgaatgaatgaatgaatgaatgaggtagaaggggctggagggatggctcagcacttaagagtactgggtgctcttccagcatacctgagttatattcctggcacccacttgattaaatgatagtgttgtttgtttgtttgtttgtttgacatgtatgggtgttttatctgtatacgtgtatgtcccacaagtgtacagtgccataagagagcgcccagtcccctaggactggaattacagttatgaaataccgtgtttgtgctagggaatcaaatctatgtcttctgggaaagcagccagtgctgttaatcactgtgtgctctctctctagcccatgtttgaggggattttttgtttgattgattgatctttagtttgtggggagggggtttgttttggggggttttgtgtattttttttttcttttgctcaaatgcatgtttacaagagccaccatgaatgtcagtgtgtggaaatcaaaggacaacctgtgggtgttgtcagatgttacattctccttccccacatgggtctccgggatttactcatggtggtggtgagagttggcagcaagtgcctttactccctgagcgggtgcattgactcagagggtattaattttaagtcatgattcttaagaatgagaactgtgactgctgttttgtgcctgtgttaacctttctcaggaagctgtacaagcgttacgcttttctgcgctgtgaagaagaaagagagcagttcctctaccatctgctctcactcaatgccgtggactatttctgctttaccagtgtgttcaccactattagtaagtgtggagagttgacttttaagtgaacaatctccaggtgagcaggcatgggtggccaatagctgtaatcccaacgacactcagaaagctgaaagaagaaaattgccagttcagaaccagtgagtgtgggctatgcatctttaccctttctcaaaaaaagagaaagaaaagactagctttgaggtggggagattctcaagtcactcatggaataaaagtattcatttttccaaaagtgagatctgtcacagcacaaggaggacactgacgacccctcgatttccattaggaatgtagaacactccctagccctctgatgccagcctgtgcaaaggtagtggtagcacacaccattaatcccagcactagggaggcagaggcaggcagatctctctaagctccaagacagccaggactacacagagaaaccctgtctttaaaaaaaaaaaaaaaggtctaaagactgggcatgtagctactataatccctcctgaggcaagaagatcaaaaattcaaggctggggcaggggctagatagatggctcagaagttaaaagcactgactgctcttccagaggtcctgagttcaattcccagcctccacatggagatttccaaccaactataataaggtctggtgccctcttctggcctgcagggacacatgcaggcagaacactatacataataaataagtaaatgaataaataaatcttttttaaaaattcaaggctggcctagcctacacaggaaagttgtatctcaaaagaaagggagatccagctagatagctcagtgagtaagggcgtttgccccagagcctgacaacctgggttcagctcccatggtagaacgagaaccgattcccaaaagttgccctctgagctctatatgtgcaccaaggtgacaagtacaggtatacaccacacacacacacacacacacactctctctctctctctctctctctctctctctctctctctctcacacacacacacacacatgttcactcacacacacaaacacacccaaagtgtttgtttgtttttttttaagatattaaaagaaaagaaagatcacttaagatggctaaaaacatggtcattctcagctgttttcaaggccagaatgggatgcataaatcaaatctcaaaacaaaaaacaaacaaaaggactagaaagatatctcagcagaagaaggcaccttgcatacaatcccagtgacttgaatttgatccctggagcccatggaaagatggaaagaaaaccagttgtgaatgagccatggcactcgtgtaccaacgctcacgtaggcatgatacacgatacacatgatacatgatacacatcatacacgataataagatgcctaagaacctctaaaaaatattcttgtatctgtaggtttctctttttctgagaagctttcaatttgaggcattggaatatattaaagaaatattctggtatcctagctcactccctttgccatgacaaataccatgacctgaaaacaaactaaggaaagaacaagtttattccagcttagtggttacaatctatcactgaagtaagtcagggcaagaaactcaaacaggtaagttcttaaagcagaaaggagccttagatgcatgctgaactgggcttgtctaccaagcagtgagcaacctaagttaactttaactggaaactgtacacaagctaagaaggggtctcagtccaggaattacccagctcaaattagcctgtaggcacgtctgtgagtggggttttttttcttcttcttcttttttttttcctcgattataaattggtatcagagggcccagctcattgtgggtggcactgttccctgtacaggtcctgggctgtataagaaagctagctaagtaatgagcttgtgagagtaagccaacagtcatcagtgttcttgcatggtttctgccattccaaattttcctgggcttttatatttagccaaggtccatggcaagatggtgacatctagtggtgaggcctttgaaaagggttcatatagatccgtgcacatctggctctcccagattcctggtgcacatgagtcacttcaataacctgatcctggcattctgtaggagttggttctctccttccaccatgagggttccagggtggaactcaggttgtcaggcttggcaataagtacctttaaccactgagccatctcactggctctcatgagtatgtcttaataattgatcataaaaagcccaatatcaggggctagagagatagactcagttgctaagaacacttgttcttgctgaggacctgggttcagttcccagcacccacatggtggttcatcactctagtaccctaactccagttccagggagtctgactccattcttttgacctctggggtcactagacacagatgtatgcatatataacatgcaggcaaaacattgctacacataaaaagaaacaaaataacttcataagcaaaatgtatcttaaaagcatctagttctagataattgtgggtttgtttatttgtttgttttaattcacttctgtgttttctttcagtgattccttatagatcagtgatcattccaattaaaaagctgagcaatgcgatcattacatcaaacccgtggatctgtgtttcaggagagctaggagacactggagtaatgcagattccaaaaaacctgcttgagatgacttttgaggtaggttagccaatacctttttaattctacagaagaaatctggttttgccttttcattttttccttggaacaaatgaaataaaggaacatgcagttatgtaggatcattttgttattgtagccttatacatgtctgaagcaacttacactagttagctttttatttttatttctagaccctatttttctacttgtagtaggctttaccaggtcttgttccttgattcccagcgcctaacacagaacatgacaaacagaaaatgttaagtaaaagctttccctaaagtggtttctcttcaggacgagagagctgatgtccatgcttatggcttttgaagtacaaagtgacatacatacattagtatgctttttgttttgttttttcttttctttttttggtttttttcaagacagggtttctctgtagctttggaggctgtcctggaacaagtcttgaactcacatagatccacctgcctctgcctcctgagttctggaattaaaggtgtgcgccaccaacacccagacattattttgttttttcaagatagagtttctctgtgtaacagccctgaatgtccaggaactcactctgtagaacagggtagccttgaactcggagatctgcctgcctctggctcccaggtactgggattaaatgtgtgtgccaccaccgagcagttcctataaatatgactttttatattgtcagttttggacaatataaaagatctgcctgcctctgcctcctgagtgctgggattaaaggtgtgcgccaccaacacccggcaggaatagtcattttcatttggaatcataatcccaagcccaacagtagtccatttggccttatgtatggggcagactcacatctatttgtatgtaaaagttaaaaaccaccaggtggtggtggcacatgcctttaatcccagcacttgggaggcaaaagcatgcagaatttctattaccattgctgtattttgtgcttgtccccaaaaggccagcaaggacattaataactacagttcattcgtaatgtcactttctacagttgtggtacctgctgttcattgtggtccaaaaacataaagtggaaaattccaaaagcaaaaattcatagaagctgagcatgatgtattcctataaccttggcacttgagaagcagagacagggtcagagaagttcaaggcatcatcagctccatagcaggtttgagatcagcctgggttgcatgagttcatgtctctaagagcaaaacaataaaaataagaagccaggcatggtggtacatgcctggattccggcactcgggatagaagcagaagaatgctgcaagttcaaagccttcctgggctgcctaatgaaactatctcaaaaacaaaacaaaaattaaaaattatgagtgtgcctggcggtggtggcacacgcctttaatcccagcactcaggaggcagaggcaggtggatctatgtgagttcaagaccagcctgatctacaagagctggtatttcaattgtacaacatggtaaattgcacaatgaaacctgtgctgtttctgtgtcagccatgaattctgtctttttctaacgtgtttgtgtgtgtgctaccctcccatttaggttatcagattgcagtggcttgtgtctatgtaacctttatttcacttattagtggccctacagcataagagtaatgtttcagagaaggatccaggccataaaacatggaacaactctggtatatgtagcaacatccccatgcgtataggaaagatacagtatttgtaggtttggtattgggaagtctcacacacctactgggagtcttagagtatatcacttgtaggtaagatgatttttacaaatagcttcttaaacttctctagtagatcagagccttgaacatgctagacaagcactctaccactgaactataccctagtcccttgttaaaaaatataaaaccctatcagttagtgatttttttttaaaaaattggctgtttgctctaagtcaatctaaataagatccttccccacttactgaaatcctttttacccttaagctgaggcataaatcattattagtgattctgtttctggattccccaaatagaaataaatgttacttctccagcactcctctaacacttgcttacatttctggtccagcacaccaagcactccgtcccatttggtagtcagtgtccatctcctgtctcgttgtatgaaggtccctgagcgcaaagactattaaatttatgccattaaacttagcacactgtgaagggtaggtctctgtgctaaatggagccaaagttgaaagggaatagaaaagaactgagtacagaataatttgtggtcctgtctctacagtgccagaacctgggaaagctcactacagttcagattggccacgataactccggactgttagctaaatggctagtggattgtgtcatggtcagaaatgaaatcacaggacatacatataggtgagtaaatggacttaggaggagcagaattctttatctcaaaactctttaggtaacaaaatgtttttaattttcctaaagccttccctctatctcccaaactagtttttgaggggatgtattattttgttctatttatagaacacaaaattggccaggtatgattgtctagaccttaagtcccagaattcaagagatagagacaggcatatctctgagtttgaggccaccctggtctataaagcagccaaggctacttagaatgatgatgatgatgatgatgatgatgatgatgatgatgatgatgatgatgatgatgataaatagttgctaacagttctttttaaacaaacagattggggctgacaagatggctcagcaataagagcacttatactctatccaagttcagatctcagcacccacctcaggtagcttacaactgcctgcaactccagccctaggatatccagtgcctttgctggcctctatgggtatcacatgcatctgcacatgtgtgtacacaagcacacacaaatgcatacatacacagacatgaataagaaaaaaatatttaatctttggtaaaacagattgtggaagctagagaaatagcttggtggttaagagggcttgatgctttcagttcccagcacctacatggcagatcacagtcgtctgtagctccaattccagagatccagtactcactctggcctctgcaggcacaggcatacacatggcacacagacatacatacagacacacactcatagatataaaataataaaatcttaatttagtgtgtctgtattctctctctctgtgtagcactggtgtagacaacctatcttggaattcacagagctctgcttcccaagtgctagatttaaaggcatatattaccacacctagctgttctctactgttctatgtttttgaaatttctcatggtgaaacgaacacttctcagatattagcatcatggactttacctacaacgccattttaaaatctttaattaaaactctaggaagccaagcgtgatgtcactcaggtctataatcccagtactccagaaactgaagcagaagattgcctggagttagagaccagcctgatagccttcgaataataaattctaggatagccttagcagcagagtgagaacccatctcaaaatgaaaacaagacaaaatcctagttttaaaaatgtagattcatgggatctctggagaccagagtaagttcacaacaacaacaaaagtagattcaaaagattttaaatcaaaagaatttttttttttcctgccctgtcagattcccatgtgggcggtggctggggaaaggcatcgatgatggaagcctggaaagaattcttattggagaattgatgacatcagcttcagatgaagacctgggaaagcagtgtcggactccaccacagcagaaatctcccacgacaaccaggagactaagtatcacgtcactaacaggaaagacctccagtgagttgttttctagtgtaccgcctcgggtattgcaggcttctgtggcccatttcccagaaagcagttgtgttaatgaattatggtgaggagatttacaaagatggactggggaatgactcagaagatacagtgcgctcttccctcgcataaggctcggagttacattcccagcaccctccagccgggttccaagcattcaaatagatgagcctgtgggggtaattctcattcaaactgccactgtgatttcaggtcccatgcgggcagcctaccaagccacctagaaagaggcgcagatgaccagtgctcacagggggaatggagcgaggagggtgaccagtcaggaagggaagaaaagaaagcctgacttctggccagcgcaccgcgtggcatctagctagcttcttcccttaaaccacaacagcagaatttcacgtaggtcactgagagcctcgatgccttagcaaatacctgcaagattcttggctgggaacctctgagcaatgatgaagggaaccttcctcacttcattccccacatcgggagagtgttgcactttgtgatgggaaccccgccacgtgattgcatcgactatcttgttctgttttctcagtgaggagcgtttgttggtttgggtttgttttgttttgttcttgttctgttgtggtttggttttttgtttgtttgtttgttttttaagatttatttatttattacgtataaattgttctgcctgcatgtatccctgcgctccagatcacattacggatggttgtgagccaccatgtggttgctgggaattgaacacaggacctctggaagatcagccagtgctcttaacctctgagccatctctccagcccttggttttgtttttcaactattttcagttgagaaaagccagaggaaattaaacatgtggcttgtgttgtggttcgaaggtagtgtggctgagatttgagtctcgggtctcttgggttcttcagacttggccattttatccagtagcaaactggaaaagcgagcttgctcaaatgaagtttttcctgcagggacttaacagtcgaataccccatagtatttttgttcatttatttcttacaagaatgtagacgctattaattaattattttgcagaacccaatgctggacagatccaggaaggaattggagaagctgtgaacaatattgtaaagcactttcacaaacctgagaaggaggtattatggggcaggaaagctgtgtgtatagtggggcttttttttaatttatttattttgagacagggtttctctgtgtagcgctgtcctggaacttgctctatagaccagctggcctcaaaatccacctgcctctgcctcatgggattaaagtcatgcaccatccccacctggctaccctcagctcttgtttctctagtatggttgttatttgggggtgctggggggttactttatttcatttgtataagtgttttgcttgcatgtatgtctgtgtaccacatgtgtgcctggtgcctgcaaagctagaagctagcattggttcccctggaactgtagttaaggatggttgtgagccacagtgtgggtgctgggaactgaacccaggtcctttgaaagaacagccagtgctctttgtcactgagccatctctacagcccctctagtgttggttggttttgcttttgtttttgttttgtttaagcgtagaagcagcagaattcccttgttactgtgttaacattatggtttacagagaggaagccttacagtgctgctgtgcggagaaaatggcctggttgctgcactggaacaggttttccatcacgggttcaaatctgcccgcatctttcacaagaatgtcttcatctgggacttcgtaggtaaattaagtagatgtatgttactataaagacactgaagtgtttctttaaaaaccctgcaagctggggctggagagatggctcagaggttaaaagcactgactgctctttcagaggtcctaagttcaattcccagcaaccacatggtggctcacaacaatctgtaatgagatctggtgccctcttctcccctgcagggatacatgcagacaggtcactatataaaataaataagtatataagtaaatttaaaagaataaagtaaaactcaccaggcgttggtggtgcaggcctttaatcccagcactcgggagacagaggcagacggatctctgtgagtttttaggccagcctggtctctagggcgagtgccaggataggctccaaagctacatagagaaaccctgtctcaaaaaactaaataaataactaaataaaactcaaaaagccaattttttttttatttattaattcaagttagggaacaagcttgtttcacatgtaagtcccttctccgtcccctcaccccctttctttattctgtatatctttcttattccatggctggctgtgtgacagagtttctggctcctggtgtcatcctctccttctccttttcttgctcctccctcctcttctctccagggagcctagatttctcctcttatctattctctctgcccagcagccctgcctagctactggccattcatctctttattagaccaatcaggtgctttaggcaggcaaggtatcttcattccaccctctcttaaaaagccaaaattttaaatgaatagaaattagtaatacactagtatgtttgggggctaatgagggttcaacaagtagaggccctgagtttgatcccaggcacctaccaggtggaaagagagaactgactcccacaagttgcccccacacatacacacacagtgttcactaaaataaaagagggggctggagagataactcagcagttaggagcgtttgctgttcttccagaggcctgggaactcaaccacatggtggctcacagctctccttacctataattccaggggatctgatgccctttgctggcttctgaaggtactgtactcccatagtacacacaggcatacaggcaggcagaactcccatacatgtaaaataaggataaacaagtcttttaaaaagtgtcctaagtcttttttgttttgtttttcgagacagggtttctctatgtagctttggagcctatcctggcactcactctggagaccaggctggcctcgaactcacagagatccgcctgcctctgcctcccgagtgctgggattaaaggtgtgtgccaccaacgcccggccttcttttttttttttttttttttttttggtgtgtgtgtgtgtgtgtgtcctgagtcttgtgattttctttcccctttaggtatataggattctaaacctcctagtttctttaaagggtcagtgagccatttttgtgtttgtgacgttggcctacatgaactttcgggcaaagaaagggaaattggccatgcacctaagagtgattttgttccccctcctttctagaaagcttagaattttactgctcctggctctaatgtctgcagctctctcagattaagtcagtactccacaaggcccatttaggtccatttaataatcttactgatggtagccattctagaagagggcaccacaccatcttaatggtcaaatggtcactgtgttgattcatggaagggttcactcttaggagataattcctttcatttcgtggttccttctctctctcctctctctctctctctctctctctctctctctctttaatgcttttgtttttttaatgccattttctgtttcatgaagacattttaaaagaataaactttccagccctctggaatgtggtcttgaaaataaattactagacaggtggggggggggggggctcgcctttaatcccagcaccaggaatcatactgctttggcatgaacttcttaagctctctgtgattcattctgaaatcagtgataaactaatgatttggagtaggggactgtgaagccaagccccagtagagtttccagaataaattagatggcatttctgcatacaactgttgtagtgtgttgtgattctgcttgtcttcctcagagaaagcagtggcttattttgaaaccactgaccagattttagacaatgaagatgatgtactcattcagaaatcatcttgcaagaccttctgccactatgtgaatgctattaatactgcacccaggagcattgggaaggatggcaaattccagattctagtttgccttggaacaaggtacagagtcaaagttacgctttccttatttttgttacgtgggtaagaaaagttatatgccaggttatggctatttctcttgtgtttcttctttccaacttttattatgagactactgtctcccgggcacctttctgttacagtagaaactgatttacccatttcttaagaaggtttctgtgttttattttgtatatgaatggtggtttgcctcgcttggtgtggtggctcacactattaatcctagcactcaggaaacagacttgaagatctttgagctcaaggccagcctggtttacaaatcaagttccagtactacagagagaaatcctgttactaaaagccaaaaataaatagataaatgtatgttcttttgcctgcatgtgtgtatgcgctaattatctggtgcctgcagcaaccagaagagggtgctggagttaaagacagttgtgagcaatgtttgggccctggaaattggacctagatcctctgcaaaagcagaaaatgctatttaacactgagccatctctccagcccccatatacctattttataagtcagaaaataggaattagataggcccaaatacattagcaaactatcccaaaatcgcatagtaagaaaatagccattccttatggcactggtctgtaataccagcccttcaggaagcaaaggcagacaaatcacaaggttaggcattgccttggccacagagcaagttcaggacctgactaggaagttagttagtgagacactgtctcaaaatatgaaaagagggcgggggtggggcttagaggtagaggccttaaccagtatgcacaaggacctaggttaaatctacaccactgagcaggggagggagtgataaataaatgtttagtgaaaatcgagataattttattgtttttgtttgttggttttgctttttgttttttgagacagggtttctctgtggaacttcctttgtagaccaggctgaccttgaactcaaagaaatatgtctgtctctgcctgccaagtgcctagccagcccttacccaggaggagtttcgagagggacactgagatggattaccggggaatactgggttaattagcaaagttgttaactgaacaaagaaatgaaataaaaggatgttgacattactactcctaaagtatggagaacatttttactgtagatacaaggagaaagcaggcagagagaagaatgcaggctgatcatggccagaaaattaaactggaccatgagagaagagaaggggagagagagcaagagaggagccactaaccaagagaggtggcttggaccaagacccaaaatggctgagttatgagggatcaggctaggggaagagaagccaagcccctgaggtggagtagtttagggtaagggtgccgggtgagaagtgcaagagggcccatgggtgtgctgagagagatttatcctgggtttgcaaccaacatctacatagtggacagacaaaggggccactaggagagtggtctgcaacctaacatctacatagtggacagacagaaggggccactaggagagaggcctacgcagacagcatggtaggggctctgaagaggggagccacagcccacacaatggaaataatattctattcttacttctttctgagaatgggaaagtttttacattacaagcctgtagctaggctctcgattcccagagaggcaggaggggggggaacaggatgtgtggccaatacttcctttgatgtaaacttacttccaaagtgtgctaccattaacatagaatttggctgggttgggcaccatccaactcctactctccctagtgtgtgtacattgtgtattgttcatgcctgacctgtgggtcacagcttgtgccacaagccaggctcagctacctgtcctggttaagcaaagtaaaattgccaaattaatagtgaaagcaggggctagagagatggctcagcagttaagagcactccctgctattccagaggaccctggttcagttcccagcacccacatcaagcagcaaataaccacctttaactctgactccagggggtgtggtcaccacttctgacctccataggcattgtacacacatggcacaaacatatatatatattttcctagtccaacatagggctgggacttgaggaaaaggattgtgaaaagtttctataccctgataagcaagcctctctgccgatgtagcagtctgtaagacccccggaggctcaggcccccaggatcttggccagaaccgaggccaccccaatcaccaggtgaaggcaaaaacctgatgcaaacagcacgaggctttattgcagttgtttaacgagctaaccccatgttaacttgggcctttcatccatccaccatggcagatggctaggaaagatgctgagaagccacgccatagagatcttaaaggggagtgtctaggggtatgcacaggctcaggattggtgtgcctccaggcttggaggacttgccctgtgttgattggtcaagtggtttttatgtcccataggccctcccagggtgattgctatgctctgtgcatcattgctgtgcacttgtctgtaaagcatagcatcaccagctaacttctgagccaggcatctgacctcatagtgaccaaggtcaggcaagcacgtattagactgttatggctgctgaaatggggggagctggtcccttcagtccaaatcagaccaaatcaaatcaaattagaaaaagcccatgtttaatggatacatcgctcaaagctcctgtatggcctcccagccccctagagaggagacaggaaagacagccccggaaaaccacaggtctattttctgggggatggtttaaataccctgtgggagtggtcttgagcatctcaggggggctttctgagatgcaacagggtttggagggagatagtggaatggggcttgggtggagcttctgtcccaccaaagtaaatccacccattattttctaagctccatatctctcctacaaggtcacctgacaagttcttcctcagtctgcaccaaagacttaagccttctcccaggagacgattccttgggggaacttttattttactttgagacagggtttcactatgtagctctgactagcctagaactcgttatatagacaaagctgacctcaaacttaagagatctgccggcatctgctttccaagtgcttggacgaaacaggtgtgtgccaccacagatgctcctaggagaaccccttttttttttggggggggggttccaggcagtgtttctctgtggctttggaagctgtcctggaactagctcttgtagaccaggctggtctcgatagtgctgggattaaaggagttggccaccccataccccattcccactcccacccccatccccagcttaatgtattgtagtattattgtttcaataggctgataattaaggggaaagacacaagggaggtccctttacaatgtaccccttagagctcagacactgtttctgtttgggtctgtagggatcacctgctcccacagtggattccattgctagcagaatgtcctgccatcacccgaatgtatgaagagagcgcactcctccgagaccacatgactgtcaactcccttatccgaattctgcagaccatttaggatttcaccatagtcttggaagggtctctcatcaaaggagtagatgtgtaaaccagctgacagaaactcttcatcctggccctggctcccgaacctcccccaactgtgggacctcatttgcactggtctgacaatagtgagcactgcctgggcagtgcacccatgggaagcccagtatgaacagtcgccactctgcacacaaggcaaagtgctgtattgtagttcatttgaacctgaaatttagtataaaacagagtattttcatgtgttagatgtgtgtaaatatgctatctttaagaaattatattactctaataagatacttttcttagattgaatattcctgtgacttaaaattagtagcctaaaaaaaaaagttgggggtggggagagtggtgctagtcaggaagaagccagtcaatgtgtaaattgcgcgcccagtagggcttctttttccctcctggtatcttgaaggaacccagaatgcattgttctgaagcagccatccttcctggagttccatcctgtgtgtggtgaatgtacacagctttacatactgtacagcagtatgtacctttaagttataaaccatttaatacgtttgaattatgagtcacttctccagtttggtggaaattttttcaattggtacaagtaaaagatataattaaagtattttaaaattttaaataccaggnnnnnnnnnnnnnnnnnnnnnnnnnnnnnnnnnnnnnnnnnnnnnnnnnnnnnnnnnnnnnnnnnnnnntttgaaaaaaaaacacaagaagccctgagaagtgtgttcaagtgtgggattacagcttctttaatttggaaagattagcctgaagtagcttcattcttggaatttttgtgactgttgtttgagaataccttggagataatgaatttcagcattaatcgtatagtcataataactgcaaaagaaaaccagtgtgactctgtgcttttcacttggccacctaaactctaaccagagttagactaccaaccctgcctttgttaggttccagccaccccctctgccagggccccatcccccctcaggaaatggaaggaatgtgggagaaggaggaggtctctgtgtgattggaatgcttttgtgaaagtatttgttgaccatgataatgcaaataacaggggcagagagaaagaatgaagcctttctgggtgtttcagggcaatgtgaggcaattggcatgaagaagttaagagccactggggcagactgagaagtgaaattgagacaacaatttagaaagacctgaagttagaactttctagtttgatagtctattttttaagctaaataaatatgttagcagttgcataggtctttatcttctggtgagtaaattcgtagaactctaattaggcactgataccctgttagcagaaaaattgtctcctcaaagctccaggtttattccccattgcagctgaaaaacagagctatgggctccgaggagccttgcgcaatataagggtcctgggctcttgccaacagtgttgttttcctcatttactataggaagaaactgatagaccaggggcctcactccctgaatcagagactgactgttcagccaaggaacagctcctgggaatgtgaatagaaaggggctccagatgacctgggtaaaccagacatttgtttacctaaaataaaagtgtgtctaaagtattcgactattgtagagacacaaacctgctatgggaaacatccataagctatcaatggtccattccaggatgttactgttctcttttcccatagggccatcatcctgacactgagcactggatagattttaagtaagtatgccacaattgagtcaactagtgcagcttcttcattttatacatggaacagagtcaaggaggtaattaatagtcttgcccccccccaccttgacaacacaggatttggagtttatgctttttaccacaccagatgcatgaaaccaaccttcaaggcattcttacttaatagtatttcttctgttgagtcttcattcacctgtagagatgtgaagcaatattcctgtaatacttagtaaggactgatacttaagttaaattgttttgctgtgttgttgcgtgtaaaacaagatctctctgtgtatggctctgaccagccttggaactccatttgtagacatgctggcctgaaactcacagagatttacctgcctctgcctcctgaatgaggggaatattcaagtgagtgccctgcccaacaaactgttcttaactctttgttgttgttttgttttgttttttccagacacagtttctctgtacagctttggggcctgtcctggcacttactctgtagaccaggatggtatcgaactcatggagatcctcctgtctctgcctcccgagtgctgggactaaagttgtgtgccaccactgcccagcttgttcttaccttcttagacattacatctgttgtaaaaactgcattacagcttgtgtttaaaactgttacttaaaacgtaataccaaaaaaaaaaaaattacctataaaagttgccatgtggtatcatttggatgaactagtgaaatggctgattaaaactatcatacatcctctcaaagactggccttaccccttggtggtaatctttgccatatggaatagatgtaatatgtagaaatactataaagaccttaggagaatgctcccactgagtttggggttaccaattacaaatgataaagaagtaagacttaccatgtggcttataacaacctgaatcagtatgagacatatttacattaccacaaaagcagattcctcagaactaatgcacataaccataaggattcaggcattattctggcctgcccctgtcacctggcaggatgcactcaggcagtgccctggtcagcccagggtcccatgattgcatggatgcctgtgcagaggacccccgcccacttatgctcctttcccgctgttccctgggggcagaaaggactcttcctgtcttcctcttctcttgtgtcctctctgtgtgtctctgtgctccttcacctctgttctcttcccttccccttcctccccttccctcccctctctaatacaacttcacacataagctctgcctgccaggcatgtttgtcccccacctgggtcaccctcgcctgccttggaatccgccaaggtcccccaaacgctttatcataataaccatccaaggaccatacgacaggcacctttcttgctgtgcatttttgtttaaactagtatcatgctttggaatcacctcaaagtaaatgaaaatcaaaactgcttcttttgtgtatatgattgtccaaatcactttaaagcaaatatctgggaccataattaatattccacatagtaacttggaagtactttttttgggggggaagggtttgagacagggtttttctgtggctttggaggctgtcctggaactagcttttgaggacaggctggccttgaactcacagagatccatctgcctctgcctcccgagtgctgggattaaaggcatgtgccaccaccaccccgctagaggtaacttgttttaaagttaaatctgcaaggctgaagtgatgcctaagcagttaaaagcactgcctactcttgcagaggacccaggttcagttcccagcacctacatggtaacttacaaccacttgttactatagttgcaggagatccatgccttcttctgatctctttaggcacccagtatggtgagcatatatacatagaagcaaaacactcataaaataaaaaacattcataaaataaaaaattattaaatttgccatgtctggggatgtagttcagtggtggagtatttatgtactatgtacaaaacctggggttctgtcctcaacagtcaaaaataaaattgccaaaatctcaactccttcaaaagcttatttgccaagtatttttcttgagtactaaaatctctaaccacaaccttcatgtcacctttatggtagctttataatagtttccatgttatgtgtgaaaagttttctatgctacgggaagcagggtgtcctcagcgccttagcatggctgagactgtccctgtgagcgggaaaagcagggttaccaagaacaagcggagctgcccaacctgaccttgtttcccactgggaaacctaaaatttgcaaaggtggaatttcatctaaaattcattttaaatgtttgtacttactgtaccttttctagctctgtggggtttattttaacatgactttttaagaaattattttaatgaacttctataacactatgagttagttacactacaccaagtcgcttctacttttcggacagtgagttcacatatatgtaaatgtagtgaaaaatacattaagactatgcatagtacctcatgtgtagcaggtgttaatatctctaaaatattttaaaagatgaggcagtacacaaggagggtccccaggaaaatatttgacagcattgggaatagagctcttcattcataatgtgaaatatgttctaagaatagtggctttccaagagatttttttgttgttgtttaggaaattgtattttctctgaggtctacagaggctagtctactcttttcatggtgttgaaagggcactctgaactctacttacatatgtcagcattaacacacttttattgattgacatcagaactctcttcctttctgataagagtaaatactacttccaggcctctctttcttgtctggttagttggtttgttttggttttgatttttgttggttttggttttggttttagttttggttttcgagacagggtttctctgtgtaacagccttggccatcctgcaactcactccatagaccaggttggtctctgaactcacaaagatccgcctgcctctgcctcctaagtgctgggatcaaaaatgtgcgccagcacacctggcaagcatctatgtttttagaaatatttgtttcctatataactatttattgcattatcatttagcataacaaagagaaagatgtcctttttttccattaaaatacatatgcaaatcttctagatcaaaccgaattttgagattcttgaagagatttgcttttacagtatgatgaaaggaagccaaggaggggctggactggagctcagtcaacttgtgtgcttagcatacacaaggccctgggcgctcagcaccccaacaaaagagaacaataaatccaaggatgatcataccttcccaaatgggatgcctcttttaaggataaggtcaaaattcagaaagacacactgaggtatttatatttatatcagactgaaaaataaattacccaattcctgcttttagaaagggttctgctatatccttagttatttaggaaggagccagcttgatccagttacttgtggattggatccaatgtgtattttaaacaaattttgatgtagaagggaatagtaaggtcaaatgatgatgtaaaacagaaaaaaaaatctgctgcacttgaaccacatgtaaaggtatcttgtgtttgtttgtttgcttttaattaatatttctccatttaaattattgtttccctttgtattattaacaatgtgtgtctgaactggaattttctcccccttcccaatctgaacataatatgaaatctgaagagtattgtgatattaagcactttaacatatcgaacaaactgacttggatttttcaggttttggagtacatttaaatatgacttttcatgctttgttctttacaaataaaactggggttgatactttgttttgtttcattattgggtcttactaaaagtttcacaagataagatacttaaaaagcagagataaaactaaaatcattatacagcactcaggaggcagaggcaggtgaatctctgtgagttcgagttcagcctggtctacagaatgagttccaggacagcctccaaagccacagagaaaccctgtctcaaaaaaacaaaacaaaaacaaacaaaaaactaaaatcattatatagaaaagtaagtaaaaacctgctgaacatgggattattcagtgtggtagtttgaatggatgtggccccatagacccatgtgtttaaatgcttggcttataggaagtggcactattaggaggtgtagtcttgttggaggaagtatgtcactattagggcaggctttgaggtctcatatgctcaagctgcacccagcatgggacacagttcacttcccattgccttcagatcaagatgtagaactctcagctaccatgtctgccagcacaccgccataatgctaatggactaaacctctgttattgtaaaccaacctcaaatgttttcatttacaaaagtcatggttgctgggtggtggtaagcacatgcctttaatcccagcacttgggaggcagacaggtggatctctatgaattcaaggccagcctggtctacagagctagttccaggacagctgaactttgccaagacagtcctttttgaaggacagtccttcaaaaattcctgcttcacagaaaagtctgtcagatcttttaggtccatagactgaagatggatgccccaatgttgcggaagaattttgggtgactgtccaggaatccagatgtctctgttgtctctatatttttggaagttgtttgcaatgcactttgtttgtacaggtaatattatatccttctgaggtctttcatggaattgaagactagatagttatatttttccttagtcatgatagaaggtaaattaggtacaaaacattggattcaccaacagagaataaataatggactattttctttaaaattgccaaatataagtgcactggacattttaactgtaattcttacctgataattgttcttattgtatacagtttttatttagaagaaagggaaatattacaagatatttgattacactgagtaaaaatatatcactgtgactgggtggtggtggcatacacctttaatcccagcacttgggaggcagaggcaggcggatctctgtgagtttgaggccagcctggtcttcaaagagagttccaggacagtctccaaaacatacagagaaaccctgtcttgaaaaaccaaacacattttcagggcagagaggatactgagaagaaaaagggtgaagtcacagggagccaccaggagaaacaaagggagcaagacatgctggaggacaggtaaagtcatgagccatgtggcaatacacagattaatagaaatgggttaacttaaagtgtaagagctaattagtaatcccagcactcgagaggcagaggcaggcggatctctgtgagttcgaggccaggtctccagagcgagtgccaggataggctccaaagctacacagagaaaccctgtctggaaaaaaaaaaaaaaaaaagctaattagtaataagcctaagttatggccaagcttttattattaatcaccagtctccatgtcattaatggggagccagcaatcctgaggaaaaggtccaactatagagcagagctcttccgtggccactgcatcagctcctgcctccaagttcttgctctgtttgagttcttgtcctgacttccttcaaggatgaagagtgacgtggaatggtaagataaataaacccattcctcctcaagttgcttttggtcatggtgttttatcacagcaatagtaaccctaactaaaacagggattggggaggggtttccctttggacctgaaagtccacaagcatacatgtgggcaaaacagtcataacataaaaattttttaaaaagaatgtaagctcatacagccattatggaaataagtaaagctgaaaatttataggggttggcaagattgtttagcaaaggtacttgctgccaagcttgacaatctgggttcgggccccaggatccacatggtggaagtacagaattaacttctgcaatttgtcctctgacctctacagacacatcttgatatgcccctaccatgtagcagtgtcttgcctgtgaacctgtaacggtggccacacccctttgggtgtggcttcaggcagacagaagcagaaagagggaagtggaagtatgaggcatggcttctcttgtgtgcagtctttcttttgagtcagccgatccaataggaagggcagagaaacactcccgaggttctttattatcatctgtgtaagtgttccccaataaacacccattatcatttatcttgggtctagtgaaatctttgtatccttgttttcaccaccatacacataaacaatttgagaaaatttgttttctcaaataaaatttgagaaaaaattttaagctgaaaataaaactactatgtgacccaactctcctaatcctggatgtgtacctaaaagattctaagagatacctacacccccatgttttcactgctatatattcacagtagccagaaaacaaagccagcctagctgttcattaacaaatgagtatataaagaaactgtggtacagacacaatggaatttttaacgatttatttatttttattatgtatgtgttacatatatgtgtgtgagcatgagtgtgccatggcatacctgtgggagtaagagggtaactcgggagttaagttctccttctctcatgtagggttcagagatcaaacacaaataagtcatcagggctggtgacaagtgcctttacctgttaagcaaatatatgtaaagtaaaatagaaaaactttcttaattgggtgtggtgtgtgtgatgaaactagaaacgggatcatgagtgaaaaggaagaaatgttacgtgaggaaaagataaggtaatagggtatacctgataagaggatagtaaggtaggttatctgggggcaagaaatgagacaagcttgatcagggccttggtccaggggtaagatgacatcataaaacccatcattttgtaagctaatctaaatttttaattgaaaaaaatccataaacccaaatgtggcatcgaaactgcctttcctagaagataagcccaaatatgtgagggggtactgtgaggatagagtaggtaaagttacagacagcaagttgaaccataggttaaaagggtaatgaaggtgtacacaaatacacctgaaatgttagcataagaaccaccacaaagaatgaaaacaggctctcgggcccatgctttgtctagaagcctctttttcataacagccttttttttttctttgaagaatacttatttttgcccagcttttatctgtttgaaaatgtttatgaccatggaagaataaacaacttcctcagctccgtaaactcttccaaacttgtaggacagcaaaaatactagatggtgctggctgtactttgaaaaagaatagttgatctaggctgtggaaagggattaaagagaccagggcaggaatgtggttgaacagaactgatgatacatgcagtgtaaagacctttcttacctgtggaaccattttagacgctgtttctccaatagtaactttataacaacaaaaagcctgtgtgtgtgtgtgtgtgtgtgtgtgtgtgtgtgtgtgtgtggagagagagggaaagagatagagagagagagcgaggggggggatatgagctgggctcattgcttttcctcaaacaatcctgtatattaaacatcatgggctgcaaaagtagctctgttggtagagtgcttgcctaacaagctggaagcctgactggtttagtcgtcaaccctgcatatactgggtgtggtgtcaaatgcctataattccaacactaaagacggggaggcaggaggatcaggagttcaagatcagccttgggcatatattaaataagaagctaccttgtgccaggcagcggtggcacacacctttaatcccagcactcacaaggcagagaaaagtggatctctgtgagtttgagactagcctggtctacagagcaagttccaggacagactccaaagccgcagagaaactctgcctcgaaacgaacccccctcccaaaaaaaaaaagaaagaaagaaaagagaaaaaaagaagctaacttgcagtatatgaggccctatctcaaaaataactaccagcagtggtggcgcacgcctttaatcccagcactcgggaggcagaggcaggcagatctaacaccatagcccatagcccttgttattggctaagtgaaaaagaaaaaaaaaaaaaataggaaactgaagttgatgttgctggcctcagcaagcaaaatccctgaccttctgctctcctttcacctgtttctttccccccaaccccaaggcaggtcttagaaatggttatctcctccgttggccctttgaccggtagggactaagacctgcctcacagagggcccagccccagacatagaggagaaatgctgaagaatcccgacagacaggccttgctgggtttcctacctgacagctgtccgtcagtgcttgactaagatgatcttttggtccagtcccattgcagcatcgctgtgcattatttggtcacgcctacccagtgaagtttccatagagaccactggacatggttcagggagcttgttttggccgagcacatgacagttgagactggggcttgtctggcaaggccagggatgctctgaatgttgccacacaccatgcccagtgcatctcatcctctgtatccttcacaatcttgcatgacgaaaatgtttctctgaagtctgagagccattcaagcaaatgtgttgaaactgagacattctgaaaatactgactggtggaataattgttaaaacaatctagggcaggtggttatctccatacgatacaaggtgggacagtggcagatctcactgggaaagataaacttgccatcaggcagaacttaatgggaaggaagttttattgggaggggagatagagaaagggggacagggggagacagaacagacagggatcttctgtctgcctcctcagagagatggtgggggcagattgcctcttaaagggccagagtaagtacacctgccatgtatagagggctgaaaggcggggccaggtttgcctagattacaacaacagtgatgaacatccaccattgggatctgacatgatctccaacagacagttgcagcccttggtaaattaagggaaaggaactgggcatgatggttaatgtctgtattcccagcactcagttggctgacactggaggactttcacaagttccaggccagcatatggatagatagatagatagatagatagatagatagatagatagatagatagatagatagattttaatgcgattaaagatctgtctcagtggttaaaagtacttcttcttacagaggaccagtgttcagttcccagcatttacaaagtgactcacaaccatctgtaactctattcctagggtcccaacaccttcttctgacccccacagacaccaggcacacacatgctacatatatatacatgcaggaaaaacaaccacacagataaaataaataagtataaaaaaccatttttttaaagacaacaaaacccctaaagaaatgatagaatttattgactgtccagaaacagggaaaaacaagaaaagaaggttcaaggttttgaggcttagaagcagtggtttccagctattcattttcattgttgctcagtcttggccttgaagactgtgtgtatgtctaatatctggctggttacagatgcagtggttggccgagtggcaaaattccacatgtcgatggtcgatgagcagtgaaccccagctgcctgggtgccatgcttggggtacagtccatccccatggacataagctcctggctgctataggaagagccctatgttacctaacaatgaataagcacacaggaggagatgagtagggaatgagagaggacattttcagaactgtgagacccgccagctttctctgggcagtggcaggctggccagagaatgcagttgctttaatcagtaggaatttaagtaattagtataatgctgagcacaggtttacaagatttctcctttggacatgaaatttatttatctgggctgctgttttcctcagtttcattcctacttttaggcttgaggtttttgttttttggttttttgggtttttttgttttgttttgttttttctaaatggcatgtgggtatggcttgtaaatgataagcttggcacgttagcagctaaagcctgaagcagggagatgaaaccactgcatgaccgcctgtgctgtaaattgagtctggatatacttcacttactcaggaagctggtaacttgttgccaacagaaacctaaagaaacactttctgcaattaatatgttaactatcattaatggctttgttttctgcagaccagccaacagcttcttggtcttgataaacaggttctgaacatatgagctcagggagaacaggaccagcaaggatcccgctgtgaaatgctacccgcttcccaggatgaatcaaaacctggaacttaaggacttcatctcatgtgtcaggaatggttggtgacatatgttttacagctgccagtcccaggctttactaaacatacacatcttttcctacaacctggagggcagtgtgcctctctaacatactcccagctccccagttctcaaacctcacttcttacactccttgttattcttttgtttaaaagaagaaaagagaaatattgagatggacatattgactataagtttattataaggcagaatgggtagactaagaagaggaacagggcaatggctgaccgccatggccggtcgccatagagagacagagcggggaaacagagaggggacagagagcaggaacggggagagagagagagagagcgcgagcgtaaaggggcagagagagagcggggaggggcaggggaacccagtgaacnnnnnnnnnnnnnnnnnnnnnnnnnnnnnnnnnnnnnnnnnnnnnnnnnnnnnnnnnnnnnnnnnnnnnnnnnnnnnnnnnnnnnnnnnnnnnnnnnnnnnnnnnnnnnnnnnnnnnnnnnnnnnnnnnnnnnnnnnnnnnnnnnnnnnnnnnnnnnnnnnnnnnnnnnnnnnnnnnnnnnnnnnnnnnnnnnnnnnnnnnnnnnnnnnnnnnnnnnnnnnnnnnnnnnnnnnnnnnnnnnnnnnnnnnnnnnnnnnnnnnnnnnnnnnnnnnnnnnnnnnnnnnnnnnnnnnnnnnnnnnnnnnnnnnnnnnnnnnnnnnnnnnnnnnnnnnnnnnnnnnnnnnnnnnnnnnnnnnnnnnnnnnnnnnnnnnnnnnnnnnnnnnnnnnnnnnnnnnnnnnnnnnnnnnnnnnnnnnnnnnnnnnnnnnnnnnnnnnnnnnnnnnnnnnnnnnnnnnnnnnnnnnnnnnnnnnnnnnnnnnnnnnnnnnnnnnnnnnnnnnnnnnnnnnnnnnnnnnnnnnnnnnnnnnnnnnnnnnnnnnnnnnnnnnnnnnnnnnnnnnnnnnnnnnnnnnnnnnnnnnnnnnnnnnnnnnnnnnnnnnnnnnnnnnnnnnnnnnnnnnnnnnnnnnnnnnnnnnnnnnnnnnnnnnnnnnnnnnnnnnnnnnnnnnnnnnnnnnnnnnnnnnnnnnnnnnnnnnnnnnnnnnnnnnnnnnnnnnnnnnnnnnnnnnnnnnnnnnnnnnnnnnnnnnnnnnnnnnnnnnnnnnnnnnnnnnnnnnnnnnnnnnnnnnnnnnnnnnnnnnnnnnnnnnnnnnnnnnnnnnnnnnnnnnnnnnnnnnnnnnnnnnnnnnnnnnnnnnnnnnnnnnnnnnnnnnnnnnnnnnnnnnnnnnnnnnnnnnnnnnnnnnnnnnnnnnnnnnnnnnnnnnnnnnnnnnnnnnnnnnnnnnnnnnnnnnnnnnnnnnnnnnnnnnnnnnnnnnnnnnnnnnnnnnnnnnnnnnnnnnnnnnnnnnnnnnnnnnnnnnnnnnnnnnnnnnnnnnnnnnnnnnnnnnnnnnnnnnnnnnnnnnnnnnnnnnnnnnnnnnnnnnnnnnnnnnnnnnnnnnnnnnnnnnnnnnnnnnnnnnnnnnnnnnnnnnnnnnnnnnnnnnnnnnnnnnnnnnnnnnnnnnnnnnnnnnnnnnnnnnnnnnnnnnnnnnnnnnnnnnnnnnnnnnnnnnnnnnnnnnnnnnnnnnnnnnnnnnnnnnnnnnnnnnnnnnnnnnnnnnnnnnnnnnnnnnnnnnnnnnnnnnnnnnnnnnnnnnnnnnnnnnnnnnnnnnnnnnnnnnnnnnnnnnnnnnnnnnnnnnnnnnnnnnnnnnnnnnnnnnnnnnnnnnnnnnnnnnnnnnnnnnnnnnnnnnnnnnnnnnnnnnnnnnnnnnnnnnnnnnnnnnnnnnnnnnnnnnnnnnnnnnnnnnnnnnnnnnnnnnnnnnnnnnnnnnnnnnnnnnnnnnnnnnnnnnnnnnnnnnnnnnnnnnnnnnnnnnnnnnnnnnnnnnnnnnnnnnnnnnnnnnnnnnnnnnnnnnnnnnnnnnnnnnnnnnnnnnnnnnnnnnnnnnnnnnnnnnnnnnnnnnnnnnnnnnnnnnnnnnnnnnnnnnnnnnnnnnnnnnnnnnnnnnnnnnnnnnnnnnnnnnnnnnnnnnnnnnnnnnnnnnnnnnnnnnnnnnnnnnnnnnnnnnnnnnnnnnnnnnnnnnnnnnnnnnnnnnnnnnnnnnnnnnnnnnnnnnnnnnnnnnnnnnnnnnnnnnnnnnnnnnnnnnnnnnnnnnnnnnnnnnnnnnnnnnnnnnnnnnnnnnnnnnnnnnnnnnnnnnnnnnnnnnnnnnnnnnnnnnnnnnnnnnnnnnnnnnnnnnnnnnnnnnnnnnnnnnnnnnnnnnnnnnnnnnnnnnnnnnnnnnnnnnnnnnnnnnnnnnnnnnnnnnnnnnnnnnnnnnnnnnnnnnnnnnnnnnnnnnnnnnnnnnnnnnnnnnnnnnnnnnnnnnnnnnnnnnnnnnnnnnnnnnnnnnnnnnnnnnnnnnnnnnnnnnnnnnnnnnnnnnnnnnnnnnnnnnnnnnnnnnnnnnnnnnnnnnnnnnnnnnnnnnnnnnnnnnnnnnnnnnnnnnnnnnnnnnnnnnnnnnnnnnnnnnnnnnnnnnnnnnnnnnnnnnnnnnnnnnnnnnnnnnnnnnnnnnnnnnnnnnnnnnnnnnnnnnnnnnnnnnnnnnnnnnnnnnnnnnnnnnnnnnnnnnnnnnnnnnnnnnnnnnnnnnnnnnnnnnnnnnnnnnnnnnnnnnnnnnnnnnnnnnnnnnnnnnnnnnnnnnnnnnnnnnnnnnnnnnnnnnnnnnnnnnnnnnnnnnnnnnnnnnnnnnnnnnnnnnnnnnnnnnnnnnnnnnnnnnnnnnnnnnnnnnnnnnnnnnnnnnnnnnnnnnnnnnnnnnnnnnnnnnnnnnnnnnnnnnnnnnnnnnnnnnnnnnnnnnnnnnnnnnnnnnnnnnnnnnnnnnnnnnnnnnnnnnnnnnnnnnnnnnnnnnnnnnnnnnnnnnnnnnnnnnnnnnnnnnnnnnnnnnnnnnnnnnnnnnnnnnnnnnnnnnnnnnnnnnnnnnnnnnnnnnnnnnnnnnnnnnnnnnnnnnnnnnnnnnnnnnnnnnnnnnnnnnnnnnnnnnnnnnnnnnnnnnnnnnnnnnnnnnnnnnnnnnnnnnnnnnnnnnnnnnnnnnnnnnnnnnnnnnnnnnnnnnnnnnnnnnnnnnnnnnnnnnnnnnnnnnnnnnnnnnnnnnnnnnnnnnnnnnnnnnnnnnnnnnnnnnnnnnnnnnnnnnnnnnnnnnnnnnnnnnnnnnnnnnnnnnnnnnnnnnnnnnnnnnnnnnnnnnnnnnnnnnnnnnnnnnnnnnnnnnnnnnnnnnnnnnnnnnnnnnnnnnnnnnnnnnnnnnnnnnnnnnnnnnnnnnnnnnnnnnnnnnnnnnnnnnnnnnnnnnnnnnnnnnnnnnnnnnnnnnnnnnnnnnnnnnnnnnnnnnnnnnnnnnnnnnnnnnnnnnnnnnnnnnnnnnnnnnnnnnnnnnnnnnnnnnnnnnnnnnnnnnnnnnnnnnnnnnnnnnnnnnnnnnnnnnnnnnnnnnnnnnnnnnnnnnnnnnnnnnnnnnnnnnnnnnnnnnnnnnnnnnnnnnnnnnnnnnnnnnnnnnnnnnnnnnnctccttagaacctggagacaggagctcaaggccaggcttggctgcatgaaatcctgtctccaaaaacacaaagaaggaaagaaggcagggagtgggaaaacaaaacaaaacaaacaaacaaacaaacaaacaaaaacccttctggattcctcgagctttcttggaggtatctcagacccacagctgaggcagacccaggaaacaggaattgatgctgacttggggccctgataaacaaaacacagggccagttagcaacttgatctctttagggcacaccttccctgggtgctaagcatctgatctttatgcgtggttcattttatcccttcacagaaggcactgttctcatggctaatgagcatagaatcagtcttgtcactggtctttttaattttttacgtgtgtaaatgtgtgtgtgtacatacacaaacagagatcacaggacaagttgcaggagttggctctcttcttccactacgtgggccccagtaatggaatgcctattaacagacttgacagcaagtgcctttacctactgagcaatctcacctacccagtgctagtaatttttgattttttaaaacatcctaggcttaattcagctgctttcatgccaacattttgcctgcagcttattacgaagttcactgagagacagtataacgtcactgtggtggacacctcgaggcccaaacatggttcccttggtacagacagaatcaccttggacttctgaactgctctaatggcatccaaaggacacaaaggagatttctttctttctttctttctttctttctttctttcttcctttcttccttctttctgggggagtggaatggaggatggtggtgagacagtctcactcagtctgacctatgatcccctacacaggccaggctggctttgcattcacagaaatcctcctacctctgtgaccaagtactagaattacagctgtgcaccacccaccacagagctccaccgcacctccactttcagtctgtggtgagaaagacggggtcacactgctctcttacatccatgatgtcacccaaacttcagacacacttctctgaacacaaaggtaggaaaagctccattgtgtggtgagaaaggagaccaaagctaaatgctgctagtaaacacaagaatgcagagtaactgaggagggaaccagaatgccttcctgttactgggacttctaagacagaggttgaagtacaagaagcaaggttgacctggtgattttacaacactcacacacaatcacctttccatgctgaacaggactataatgtaatcccagcactcagcaagcagattcagggttgtcacaaatttgaggctagcctgatataatactcaggtgggttctgggtcaacaagggcaacttagtgagaccccatctcaaataagcatccctttctttcttttcttcgttccttcttcccttcccagtcctcatttgacttttattttgacacatagtgaagtcatctaggctggttttgaactttctcttctgactcaacctctgaagtagctgggactacaaacctgctccacagagcccagcaaatttttacatttcttttcccagcttcactttttagagactcctggctgatgggtgcagaaagtctctgtgattacctctgaatgaccgcttcaagtgccatgactccgtgtggaaggatccacctggagcctttcctgacatttgggtttctgttacccagaatctgccattgcactgacatgtgacctcacaaaccctggacattttccagctcagctttatttctataaagagacaacaagtattgtataaaaggagaatctattttcaataaaaaagatttatttatatatgtatattatgtatacacacatatttaaataaagagataatgaaacatacttcacaggattaccgtgaagattaaatgaagtaatatctgtggcattaagatgcttattaaatgtaactcctatacttaaagttaattattattagctcttattaaatgacacttgagggaagataaattttactaggttattggagtcacacatgagcaattgtttacagagtacagttgttctgttgaggcaagagacttctcaccagtatagtataactaaaataatcagaaatgatccttaaggaactaaactatagctggttatggcagtgcatgccgggagtctccatacccaggaggctttggcaggagtattgacggaagtttgaggtcaacctgggctacatagcaagactcaaaaataaaaataaaagaaaatagacctcgcctatgttttcccattactttccttcagaatatttactacaaatttataacattaatattatttaatttgtatatacatttacttaaaatatttctcccaaaccaggtatggtggcccatacctttaataccagcactcaggaggcagaggcaggaggatctctgtgagtttgaagccagccttgtctacagtgagttccaggacaaccagggctgttacacagagaaacaaatgtcttgaaaaaccaaatataggactggagagatggctcagagtttaagagcactggctgctcttccagaggtcctgagttcaattcccagcaaccacatggtggctcataaccaccaataatgagactctgagggctgtgctctcctggtagagctgagtcttgaggtagattgattcccagttttctgaggaacggccatattgatttccatagtggctgtacaagtttgcactccaacttgctgtcagacctttctgtcaggactgctggctcccaaataatgacactgagattattttattaattataaaagaccagcctatagcttagcttaggcttgttactagccagctcttacagattaaattaaccctgtttttaatcaatctacttttcatcttgtggctttattacctttactctgtactgcccacgctgcttcctctacatctagctggagaatctccccttctccttccctgtgtgcctgaagatcctagccactggacatttagtttttcattaagcaaatcagaacaacacatcttcacagtgtactaaaagtttattccacagcacccaccagcaacggaggtgtgtctcccttgcttcacatcctttgcctgtcacttgtcttattgatcttagccattctgacagatgagatagaatctcaaagttgctctcatttgcattaccctgatggataaggatactgcacatttctttaggtgtttctcagccacttgagattcctctctgtgtaacactttggatgtggaatgtccttctgaaagacccccgaagatgtactttcgtagaaggagacccgcacccaggaatcagcgagaccacagacttggatgcaaaaccgcaagaggttttattagagacgcgggtacccggggcaacttagcttctgtgtggctaagcgcaccgagccaagggaaaggggtccttatatagggaaaaaggcgcaagctagaagcagggattctattggataattctaatgaggcattgtacagagctattcccattggtcaatgtaaatgaggcgctatacagggttattcaaatgaggcgaagtatagagtcattcaaatgaggtgaaacacagagtctttcaaatgaggcgaaatacagaatcatttctattggatggttcaaatgagacacagagccattctagatcagcatattctcaaggtctggtgtctggtacaacagactcaattcccccnnnnnnnnnnnnnnnnnnnnnnnnnnnnnnnnnnnnnnnnnnnnnnnnnnnnnnnnnnnnnnnnnnnnnnnnnnnnnnnnnnnnnnnnnnnnnnnnnnnnnnnnnnnnnnnnnnnnnnnnnnnnnnnnnnnnnnnnnnnnnnnnnnnnnnnnnnnnnnnnnnnnnnnnnnnnnnnnnnnnnnnnnnnnnnnnnnnnnnnnnnnnnnnnnnnnnnnnnnnnnnnnnnnnnnnnnnnnnnnnnnnnnnnnnnnnnnnnnnnnnnnnnnnnnngggaagacagaggggcagggggcatgcagaagcattccgagcgggtctttcacttctgtgtgctgcaaatgtgatccacctgcccctgcctatgccaccactgactgacttttttttttttttaatgattctatttacttttttttaatgcacattagtcttttgcctgcatgtatgtctgtgtgaggatgtcagatccccctggattgaagttatagacatttgtgagttttcctgtgggttttgggaattgaacctgaatcctctgaaagaacagccaatgctcttaaccaggtatctcaaactgacctggaacttactatgcagcccaggaagacattcagtttctggtcctccagattttaggtgtactatatctagtttactctgtgttatgttatagattgagcccagaccctcttgtgtgcaagacattctgccaactgagccacattcccagtccctcagtataacatgtttggatccttttctgatcatgcttaaggctgggcagctaaacactgtcaggtaataaacatggctgatctgaaaaacaaacatacaaacaaacacagaaacaaaaaactggaatcaatgtttcaagacggagtttctttccagccaggtcctgcacctaccaattctaatctgaataatatatacactcaaatgtgtttagcctacgaacacaggtttgttgacttggaaacggaatggtgcctgtatgtcagctgagtgtggtccaagaatctgccgacaatgacgggagggacttagtatatcaccattatacttcctgtgcctctggatcttccatggacacttccatctgtggcaggaccatagagcaaagttgctgcgatctgactacagataggagaaatacctcactcacctcctgagagtcaggggcaggttcggacacatctgttctcttggcaccagagcagctggtttacagcaataaccccaagatagcaggcctgagagtcaggctgaaaaaccaacaaaacagggctacagcagagcactggcctaacaggaacaaggctctgggtttgaccatctgtaccaaaacaaacaaaagctattggaaaaatttaaaaacaataaaacaaaagtcgtgaagtgtggtggtgtgctgttagaccaatattcacaaggataaggcaagagtgtgaagcccacaccaggctacataaggaatttcagggtaacctagactatatagcaagaccctgtctcagaaaataaaaccaaccaacaaaacaaacatgagtcccttaatgacattacattcaaccttttcccagtacaccaaaacccaaaacatgtcaccttgtcatctagatggcagaatcttttttttttttttttcttttttccccgagataaggtttctctgtggctttggaggctgtcctggaactagctcttgtagaccaggctggtcttgaactcacagagatccgtctgcctctgcctcctgagtgctgggactaaaggcttgcgccaccaccgcccagcagcagaatcttttaaagtctagtagtttactggcctgaagggccccagtattggaaaataaaaaacaaaccccaaagcttcttttgtctctaacatggccaatgaaaaaatattaggggctggagatatggctcaggaattaagaacactgcctgttcttccaaaggtcctgagttcaattcccagcaaacacatggtgactcacaaccatctgtaatgagttttggtattgaacactgtacacataataaataaataaatcttaaaaaaatattaggattgttaagctccttttaaaatacccaagaatttgcataccttgctatgttgtacctgtggtttaattttgttttggaacaaccttggaaaatagcttcctagccaccccagagaatgaaagatggtcaggtcaggtcatgttgtaagtgacaaaactggaattcaggagaattctttccctccaacccactcccttttgtaaaaattcagccatgagtgagtagtacagtctatacacacaacctcagagcatcagacatcataggagtgcgaggagtacccaggatacctgggtgcaaacagtacaggcagactgcttttctgtcctcctacttgtctctagagctcagggaccactgcattccaggccagcaggaccctgtgacagataggccaggccaagcctagggtgcccttgggcccttagtgtgtgtggcaggggtgggggtggtggccctgctatgcaagttccagaaagtgaaagctgcaagaagacacagacacgaggctccacttttcagtttcacttttgcagggaccacatgcacagggactgagcgatcctgaaccaccctggaaggtgccctctccccactccattcagaaaatcggagtgcgcccccagtaagtggctgtccgagtgcctgttgacattaagtgaatccatgtgtctcagaacaaggattaagaggcctggggagaatcgtgccaacttccttcttctcactacaagtgccacaatctagaggcttcgttatggactggacactggtcatttataggaaagaccacagctagagatggaagatccagacattgccagccttagaactcaggacagtgaatcaggtgtggaggcaggcacgggttccgtaacagcactggatgtctattactgagtaattaactttccaaacactctagtttaggacatcagatttgcttggttgggctctgcctggctgatctttcctgaagtagcagcgatgctgcctgctgggatgccccttagtagagaaagatcccattccaggcccactcacaggaatggtactgggattcctttttctgagtgctgcaagaattcctccactgctcacaggcaaaggctatgtggagcaagggagaacagcaagagaaaacaaaaacaaacccaaaaaaactacagttcccagataacccagccttcgagttcacatcccattactattttggtattcttttattcagaattgcaccaagaaacagtgccctggagggaagaggattatgcaggagctgggatgccaggagacatcacagggcccacagaaatcacttgggagactgaaggttgtctggggagtgacaggactaattaagtctgaagaaagagcaggaactaagaatggctagggcagtgaacacaggcatagttcaggatggttgagtggagaggtacctgcaggtagagatgggggtatgtagagcggagccacgcagcgccagagcttttagagaaggagagcttcatcctggtggctacgtggaataactggctattaaaatattaaactggggtgggcatggtgaagcatgcctaaaatcccagcagcactggacagactgcagaagcagggggatctctgggagttcaaagccagcctggtctacaaagcaagtttcaggacagccaggaactgttgttacacagagaaacactgtcttgaaggcaaaataaagcaaacaaacaaaacattatactgctttggagaggatagattgaagggagtaaaataaaagagaaagccagctggctttgctggcacatgccttttatccgggcacaaaaacagcctgcccctcaaaacaaacaacaaagacaaaacagagacagagagagcaccaataagtcaccctaaatcaaggtagtgattaaagaggcagagtgcaatagggatcaaatttagggccgcatatgtgttcagcaagcactctaccaactctccagccctgttctgagattgggatttggtatactggccaagctggtcacccctacactcgaggactcctcctctgactctttaatgctgggattgtgagtactgcaccatgctcagatgaaggaattaaaggctttctggtttggggaactaggcaaaggcattttctgagatgaagtccatggtcaaaagtagtctatgttgagaggtagatgaatgggatagaagtctaggcactcctcagaggaatggggagagaggcagactagagcatcagaagtatcacaatgccaattgcgggtaatgaaatatacaagggaggctgggcatggtggcacacacctttagttccagcattcaggctggatttatgaggttcgggcaagcagatttctatgagttcaagtgagttccaggacagccagggctacatagagggaccctgcctttaaaagcaaagtaaaacaacacatacacacagacatagacacattaaataacaaacgtataaatctaaaaaagatatcatctttaaaaacagaagaaagtcttaaatctgtcaggaaactcagtaatgatggtgatgccagaagagaaccagacgggtgtgtgtaacagcactatgaacttgtgagagctaaaatacctgaaaatgaaagcccatggagaatgtagagagagaagaaaagcaatgtcttagaaatgtaaagcattactaaataccttagaatttataaatataatttccaaacctcattaaaacaacaagccaggaatcaggtatgatgacaagtcctttaataccagcatccaggagtcaatggcaggaatatctctgtgacttcaaggctagcatggtctacatagcaagttcaggccagccagcagtacacagaccctctctcaaaaacaaaaaaaagcaagctgaaaacaagtcaggagctggagaaatggctcagcagccaagatcatctgttctctcgcagacggtctcggtctctgttccgtcccccacatggtagctcacaattgtccaggactttagttccagggaatctgatgccttcttctcatctccttaggcaccagacttgctcgtggtacacatgcatacttgcaagctgaatgaaaacaaggaccactccaaggcatggttaggggaagggtttttttttttgttttttgtttttttggttggttttttgtttttgtttttcgagacagggtttctctgtgtagctttggaggttgtcctggaacaacctccaggtctagctcttgtagaccaggctggtctcaaactcacagagatccgcctgcctctgcctcctgagtgctgggattaaaggcgtgtgccaccaccgcccggcctggttactgaactttttaaaaaaccgagttttgaactgtgttctgggagttggctattgaattaaagaagcacttcgaaagtatttctttgaatctgtaatgttggttggccctacagcaaaagcagtaaaagcagcaatgatgacgtttcgcagtgatttttcactttgcaacaagggaccaaacatcaagttcttgaaaacaaataaacaaacaaacaaaaaaaccaaaaccatccttttctccttcctctccccatcatgctccaagaatcattcaaccatttgttatgggttgctgggctaaaggagtcatatccggatcgttctttcatttcctacttttccatttgaaaaagatacttcaggatcattctctcccccccttcattctttggaacctcccttttgtttcctctagattacgtccttctagaattgtctctctctttttattttctttagaaacatttaggtgttaggttaccatgtattccgcaaggaacactgtatttttgcttccactttctgtcttccccaagtggcttttcttgggcgaggtgctctccgtgtcttttcagaaagtggcaccatccccgcagtacttaccaccatgcagttcgcagagactggaatacttaggtccaagcgagcaagaaaaacaacccagctgcgggttggatcacgtctgggaagggcaatggacagtgccaagatgggactttattaaacgactcattaaaactacaagaaggaaacctttgctggagagctgacgtttttattttgtgtgtgtgcatgtggaagtgaatttgcagaagtcggttctcgacttcagatgtttttcgaagtactccgccagaaaatatttaaaagacaaaatggaaagctcaccttcaaacagattttaggcatggtgaggaggacaagtacaaactaagtgcgtgcttccaaaaagccttttctgtcacctcaagctagaaactgtgcagaggtgcgcaggatgatgcaaaagcaccttccagaactttctgcgcacaaaagagtcctaaaggggtnnnnnnnnnnnnnnnnnnnnnnnnnnnnnnnnnnnnnnnnnnnnnnnnnnnnnnnnnnnnnnnnnnnnnnnnnnnnnnnnnnnnnnnnnnnnnnnnnnnnnnnnnnnnnnnnnnnnnnnnnnnnnnnnnnnnnnnnnnnnnnnnnnnnnnnnnnnnnnnnnnnnnnnnnnnnnnnnnnnnnnnnnnnnnnnnnnnnnnnnnnnnnnnnnnnnnnnnnnnnnnnnnnnnnnnnnnnnnnnnnnnnnnnnnnnnnnnnnnnnnnnnnnnnnnnnnnnnnnnnnnnnnnnnnnnnnnnnnnnnnnnnnnnnnnnnnnnnnnnnnnnnnnnnnnnnnnnnnnnnnnnnnnnnnnnnnnnnnnnnnnnnnnnnnnnnnnnnnnnnnnnnnnnnnnnnnnnnnnnnnnnnnnnnnnnnnnnnnnnnnnnnnnnnnnnnnnnnnnnnnnnnnnnnnnnnnnnnnnnnnnnnnnnnnnnnnnnnnnnnnnnnnnnnnnnnnnnnnnnnnnnnnnnnnnnnnnnnnnnnnnnnnnnnnnnnnnnnnnnnnnnnnnnnnnnnnnnnnnnnnnnnnnnnnnnnnnnnnnnnnnnnnnnnnnnnnnnnnnnnnnnnnnnnnnnnnnnnnnnnnnnnnnnnnnnnnnnnnnnnnnnnnnnnnnnnnnnnnnnnnnnnnnnnnnnnnnnnnnnnnnnnnnnnnnnnnnnnnnnnnnnnnnnnnnnnnnnnnnnnnnnnnnnnnnnnnnnnnnnnnnnnnnnnnnnnnnnnnnnnnnnnnnnnnnnnnnnnnnnnnnnnnnnnnnnnnnnnnnnnnnnnnnnnnnnnnnnnnnnnnnnnnnnnnnnnnnnnnnnnnnnnnnnnnnnnnnnnnnnnnnnnnnnnnnnnnnnnnnnnnnnnnnnnnnnnnnnnnnnnnnnnnnnnnnnnnnnnnnnnnnnnnnnnnnnnnnnnnnnnnnnnnnnnnnnnnnnnnnnnnnnnnnnnnnnnnnnnnnnnnnnnnnnnnnnnnnnnnnnnnnnnnnnnnnnnnnnnnnnnnnnnnnnnnnnnnnnnnnnnnnnnnnnnnnnnnnnnnnnnnnnnnnnnnnnnnnnnnnnnnnnnnnnnnnnnnnnnnnnnnnnnnnnnnnnnnnnnnnnnnnnnnnnnnnnnnnnnnnnnnnnnnnnnnnnnnnnnnnnnnnnnnnnnnnnnnnnnnnnnnnnnnnnnnnnnnnnnnnnnnnnnnnnnnnnnnnnnnnnnnnnnnnnnnnnnnnnnnnnnnnnnnnnnnnnnnnnnnnnnnnnnnnnnnnnnnnnnnnnnnnnnnnnnnnnnnnnnnnnnnnnnnnnnnnnnnnnnnnnnnnnnnnnnnnnnnnnnnnnnnnnnnnnnnnnnnnnnnnnnnnnnnnnnnnnnnnnnnnnnnnnnnnnnnnnnnnnnnnnnnnnnnnnnnnnnnnnnnnnnnnnnnnnnnnnnnnnnnnnnnnnnnnnnnnnnnnnnnnnnnnnnnnnnnnnnnnnnnnnnnnnnnnnnnnnnnnnnnnnnnnnnnnnnnnnnnnnnnnnnnnnnnnnnnnnnnnnnnnnnnnnnnnnnnnnnnnnnnnnnnnnnnnnnnnnnnnnnnnnnnnnnnnnnnnnnnnnnnnnnnnnnnnnnnnnnnnnnnnnnnnnnnnnnnnnnnnnnnnnnnnnnnnnnnnnnnnnnnnnnnnnnnnnnnnnnnnnnnnnnnnnnnnnnnnnnnnnnnnnnnnnnnnnnnnnnnnnnnnnnnnnnnnnnnnnnnnnnnnnnnnnnnnnnnnnnnnnnnnnnnnnnnnnnnnnnnnnnnnnnnnnnnnnnnnnnnnnnnnnnnnnnnnnnnnnnnnnnnnnnnnnnnnnnnnnnnnnnnnnnnnnnnnnnnnnnnnnnnnnnnnnnnnnnnnnnnnnnnnnnnnnnnnnnnnnnnnnnnnnnnnnnnnnnnnnnnnnnnnnnnnnnnnnnnnnnnnnnnnnnnnnnnnnnnnnnnnnnnnnnnnnnnnnnnnnnnnnnnnnnnnnnnnnnnnnnnnnnnnnnnnnnnnnnnnnnnnnnnnnnnnnnnnnnnnnnnnnnnnnnnnnnnnnnnnnnnnnnnnnnnnnnnnnnnnnnnnnnnnnnnnnnnnnnnnnnnnnnnnnnnnnnnnnnnnnnnnnnnnnnnnnnnnnnnnnnnnnnnnnnnnnnnnnnnnnnnnnnnnnnnnngtctcttccccctctcatgttttcttaaaaagatcgaggcaacttttgcctgcttttagtaagaagaagtcgacgtgaaacttgtcattagcagggtactgaaagcacctgcttttgaactgaagtttgccagacttgagaataatttttagtgatcggtgctgcagaactgaacacgtttaaattgcccactctaaatgaaggtctgggattcgcttnnnnnnnnnnnnnnnnntaaaaaaaaaaaacctgtaaaaatatgcagaggatgatttcggaggatttgtgtgtgtgtgtgtgtgtgtgtgtgtgtgtgtgtgtgtgtgtgtgtgtgttttgacacagataagtcttagggatgaccttgaggactctggaattggggagtagggtctttcagagatagtaaaaagactctgggagaagttgctggagtatgacaatgctagggattccttgctagcttcacaattactgggaactgggttgaccttcgagttacccctcttagacttttttcaagctaaagttttttttggtatgtggctccaggcatagctcaaaaattatgctggtttgacacatggatgcttctttggtatttggggtttgcctgcagtctagacatccaaccagcagcacagtatctgttgcttttttcctgatttctcctgtgtgttagtttgttagcatctaggtgtgtcgtggaactgggaaataatgccttgccctcttgcactgcaaattggaatcagtttttacctgtttatgttattagggaaacattcaagttttggtttaccaagttagcaacactgtaagacttgagtatcctaggaaagtccttaacaccatgtagaactaaatgtttctgttcttaaaatcaaataatgcttgtcaaagagactttaacgaggtaagagaaaaatgaaggcaatgtcttcactcccttctcgtgttgttttttgtgggtggttgggggttttaaagagcatttgtgtatttgtatctgcatacgtgaggccaaagaactacttggaggagttgggtatctctaccatactggtttaggaattaaattaatataggtggtcagtttttattggctgagtcatctaactagccctgttttaaccccccccccaacttgctatccttgtgttctcaaccccaggtataggtacatgttaggtaagtattgtaccactgcctccacaactataaaataatcccccctcccccccagcgtttctctgtgtcctggaagtctgtagaccaggttggcctcaaattcagatctgcctgtcttctacctcctcagtgctgggattaaaggcatgtgcaaccaccaccaccacctgactgacataaacttttaaatgggaataaactatatttttatgtgcattggcatttctgctgcatgtatgtctgtgagggtgccagatcgcctggaactggagttgcagacctttgtgaccttccatgtgggtgctgggaattaaacccaggtctgttgttaaccgctgagccatctctccagtctcagtggggggggaaaaatcttaagccagcttcataaggctgctttgagaacaattagcttgacatgccaagcccatagctattctctttagaaatatgtcctctggtccttggagttggtttcccctcttctctaactgaaggcctgaattggtatcccagcacccatgccaggtggccctgcaatcacctgtgtaaaggaagctttgagagacccagtgctctctcctggcagcctctttgggcaccctcacatttgtgcacacaccccacattgacaaacacataataacaagtcttttaaaaagtcatccctcacccacacgctctccccccgccccccatggtaacactaactgggaagaaaggtagcaaacacatttgctgaagtacttgcttaactgttcagaagtgtctggggttaaaaaccgacttaggatgggggcggaatgctgtgtggcacctttatgtcttcaatctcagcacctagcagaggcaggcaggcaggttatctgagtttgagcccaggctggtctcactatccagttccaggacagccagggggctacacagagagaccttgtctcaaacaaaaaagaggaatgggtacaatgggaagctgcagtgcttgggttcagtttgtccagttttttcacctgtgatcatggcagtcatacctatttcacagggttgaaagtgacctaagtgtgggcagtaagtggctgctgttgtcctcgggggttttgggtagtnnnnnnnnnnnnnnnnnnnnnnnnnnnnnnnnnnnnnnnnnnnnnnnnnnnnnnnnnnnnnnnnnnnnnnnnnnnnnnnnnnnnnnnnnnnnnnnnnnnnnnnnnnnnnnnnnnnnnnnnnnnnnnnnnnnnnnnnnnnnnnnnnnnnnnnnnnnnnnnnnnnnnnnnnnnnnnnnnnnnnnnnnnnnnnnnnnnnnnnnnnnnnnnnnnnnnnnnnnnnnnnnnnnnnnnnnnnnnnnnnnnnnnnnnnnnnnnnnnnnnnnnnnnnnnnnnnnnnnnnnnnnnnnnnnnnnnnnngtcgaaaaagaaaggcatttgttttcaaggtgagaattctctctttctccactaggaatacaaaggtcacagatacttgctattacagatattttgttccagtacaaaagctgaaaccttacctaaaataatttattttctagttgtgtattttgtttcagtctattacaagtttgattgaagtagttctaactgtaagactcatttctcctagttgctcccccttttttttttttttttttttttttctcaagacagggtttctctgttttgctttggaggttgtcctggaactcgctcagtagaccagactggcccctcgaaaagttgctcccctcttgacataagaatgaaatgcttttctaccatttgtaatgtaaattgtttaccattaataatctaagcaatttatttttggtttacattttctggaaatcttttagaaatttaaatattcaggaaaaactacttttgaaaactttaaaaaaaattgttcacttacgtttctaaatgtttttcatgtgttaatgtacatgtaccaggtgggtgcctggtgtctgcagagatcagaagagagggtccctagaactggagctaatagatgtttgtgagctgctgcaacatgggtgttaggaattgaactagggtcccactggaagagcagccagtgctgggaagtgctgagccatgtctgcagtctttttcttttaattattattttctctatagtggtcatttcttccgtctctgccctttatgttcatctttgctatcctactttctttggtagtaagcaggtgcccatgtgtagagttagtacttgggtataatgcacaacgagcttccttgtcctgaggcaataacgaagtgaataggtaaatgaaatcttgattgataggtaacagctggatgttgtggctcaggtctgtaatcttagcacctgggagatgtaaatgggagaatcaagagtttgaggtcatcttcagttgtgtattgagttcatcctaggcacgtgactgcttcaaaacaacaaaattgggctgagcagtggtggtattcacctttaatcccagtgtctggtaggcagaggcaatgccagccagggctacagagcaaattccaggacagccagggctgttaaacagagaaacccgtctcaaaaaaaaaaaaaaaaaatcaaagcaatattgaaattgaagggctggagagatggcttaaaaggtaagtgcacttgagatttcagaggacctgagttcagatctcagcctacatgtcacaacttcccataactccagctcctccatgtggatccaataatactcccttctggcctccactggtccccacacatgatgtaggtacacataaatacaaattaaatacattttaaaagaataaagacatagaaaagttttgtaaataaacttccctgagtgagggatggaaaaggaagccatctcagacagaaacgcccgcctgagctctggagtggcttgttatcaaagctgatttggccctcctggaataccagtattacaagttgtgagcagctggtaggcagggctagatcccgaaaagctttgaattccttgccaaggagttcagagcttagcctgcagccagagttggtaccctggaaggatgattaatatttgaactgtaggaagataaccatgttcgagaagttagtcccaacaaagacaggaacaagacagagaggtaaggaaagcagcataagggcctttatgagattagatgggagggccttggagagagtggtgagtaagagatcagttgactttgggacttttgtctggctgtggatcataaccaaggaagctgacactgaacaacagattaggaggggcaatagtatcatcagtttggggcattaaaggttagaatggtttggtagtcacttggttgtattgctcttcatagcaaaaggaagaagttggatcaggtcgggatgttagaatttccagagagtggactaatggcaaaatgaagtgtagaggtttcgtggaagaagcgagaagagctggtatttaaaacacaattgtcagtcaggggtgttgcttactgaatgaacgcagtcctggttccagcctgattaccacaaaaaacaatgctgaattcctgtccgatgtgttggtgtgtaatattcaagaattgggatttagccctgttttaagatggcatcaaagtttaagtaatgtttatgaagtttgagttaggtatgtttgtcatcctgacttcacattttgttagagtggattgcttacgattttcctctcataccttccacttcccaagttttacttttcctgcagaaaacactcagttgaactcctaggatgtattctggaactggtaaagtttgtttcagtataatgtgcagatcttaacaaattgaaggaaaaaaaatgtatcttggtattttcatacacttggcaagaagtgagatttcaactttatattgccaaagggccagtagaatcagaaacaatttttggtttttttcaaggcagaatttctctgtgtagccctggccatcttggaacttaagtgtagaccaggctgacctcgaactcggatctgcttgcctctgccttcccagtgttgggattaaaggtgtgtgccaccatactcagctagaagcaaattttgctctcaaaaagatttatttttatttatgtctaagcgtgttcatacatttgtacttaagtgcagatacctgaggaagtcttcctctggaagagcagcaagtactcctaaccactgagacatttctccagctccctaaaagcaatttcttaattgtgaaaaagtggtagataccctttcaccatttactgtatggttacattctgtaactaataattgtaataattgcctcttaaaagcttacaaattccccaaaccctcccacatcactcttaatctagaattgggtgggacagttttttttttcctttatgttgtgcaaatgggcagactttttttttttaaataccatctaaattccagaggcctgggtttgtgatttaatttttaacctgtgctgtcctagtggaagacatgtttatgagtttggacccctttcttgtaaagtgcgttttagtaggctctgccaaattcaaccacagttaaaaatgcttaggcatatagatagcttctcagagacagagtacatgtttggaggtcttggcaaacaagtggggtctacaacctcatacttggcttctaggcaaattaaagtccatcactttaaaagtgttgaggtaaatttggaagctttaatgcaggtatctagaaagaaggaggaggaaacaatattactctttctctccagctttccctaggcactgatgtggtgtttcattgttggacaattctgcagccaagtggcctagcaatgggggaagaaacaaagcacttcttctgttgaccctttgagtgaagagtgttgctccagttctgtgtgaacacaggtgttaaagagcacacagttgattaaaatgccagcattaccagttgcagcaacttggggatccccataccctgtggttttcatgttgagtttcccatctttggatttttcttggttccatttgttttgtccatacttgtcctttgctgctttacaagggttatactgttgtctgttctgtagtatctgcagtggagtggattgtataacaggtcagtgtctttacatctgtttttgttttttaaaaattttcaagatagtgtttctcgtgtatagctctggctgtcctggaactcttgtagaccaggctggcttcccagtgctgggattgaaggcatgggccaccacagtctggctccatctcttttgcttttaagacatttatttaagctctctgctctttcgagttgttcttcaggtgaatgaaggtgcaatataataacatctgggttgtggtgctcttggttaggaatggatagcttgtagaagagaataaagcaaaagtcaccttcatgtttgcattccctagaggacatcaatattttcagctcccccccccccatagggtttctctatgtagctttggaggctgtccaggaacttattttgtagaccaggctggcctcaaactcacagagatccacctgcctttgtctgccaagtgctgggattaaaggcgtgtgccactactgcccagcgtaatttattatttacttattttttgacttttaaaaacaaaaatgtattaagatgtataacaggctccagcataacactttattatagctatagacagagaatccatatatttaaatagtggaagaggctcaccctaggtacaaggaacagcctacattttactgtatttcttaattttaaccctctatggctggaggggctgaagggtgctaacctgaggccttggctttatctcctccttgcctgtttcaggggctgcttcttgccatctttgtgactggacgtgaggcctgtggtcctttccccagaccctgatcatcctctgttgtattatctgagacaccaaagaaggtgaacataaaagatgctttgcctcattttttttattgttttatgtgtatgtatgtacacatgcacgtgctgccttcatgtgtgtctatgtaccacatatgtgtctggtgcctaaagaggccaagagaaaggtatttgattgtctggagctagagttaaatatgagccactgtgtatgtgctaggaattgaacctgggtcttcttaactgctgagccatctctcctgttcctcttttcttattttgcataggctctcatgtagcccaggctatcctggaactccctttgtatagtaatatttattgatcttgactacagtctttctgccacccattctgggttacaggcatgttgcacacacttagcctttaattatatgtgtgtggggagttttagatcccctggagcagaagttccaggttgtgagcccaccctcttgagtgctgagaatgagagattctgaaccatcactccagttcagcccttccctttcataggggaggttaactcactttggtggtggttgtttgatttttgtttattgagcatagtatttatagccactcatcctgtgatttttatcagctatttactttgcaacaaaatgtgttaagaggatatttatacaagaaagttggaggaaggagtctatgttgaatggatacattattatatattaactgtttattgtggaataaactgagaaattatagcttgtggtttctggcatttatgactttcagatacaatttgtcataaaatttgttgttgtaaatatataatacagtggctaggtttgttgtcatcaccaccactgtctataactttagaaaataagtgacaatttaaagtcctttctaagtttaattttctcctgtccctcagacacacacttacattacagatgagatcatgtggtgtttgttctactgtgtgctgcagtggacttaccctcagtcaggaagcaggtgattgcttgtggtgcagaatggtggggtgagaatgctctccaggacagacaagatgcatagctgaccaagctgtttgagcaagtgaggcagttccagaggaaccacaaactcacaaatgtgggacttggaaagaagtgaaaaacagctaccaggttgcttgaaataccagaaatctcaaaatcacaaccgaactgtgccagacccacccaccaccttctcagatataaagctgatgggggggggggctgtgctgttttctggcttcactacagagactggatagatgtttttggttttgaacataagtgactccataggttttgtgaaaataatttcagttaattccccagacctcagaatggttaaatacaaaccaccacttaatggggctgctataaacaaaggttagagtgaacacccctgtgaatttgctgcagattcccaggttgccccttaaggacatggaagagctcagaagggactaatagagttaagtgatcatccagtaagagacgacctgggtgcccttcgaggtgttaggatcttgcttcatttctcacagtatggaccctgggtttctctgctcccgccctacccttgttcaagtaaaagctagtccacaggaatgtggcggactgtcaaagactcatgttaaaagtcttgatgggctggtgggttgcttttgtgtctatcctcaccaagaaaatgactgcttggcctcactgttgagcagtggccatagcatttctccatagcttgtcagggttgtgtgaaatggaccaaactggcttctaaggcagcgagcctcacagctagaggcagtctggatgccctgtagttttggcatggtgttttcctgccgggaagggaggggactgtgagggtagagttagtagaggctggcatggagcattgtgtgtacttcctttgtccttgctcatgaagaggctgaagtttcctagctctattgatgattgtaaggggaactgtggccttttgaccttgatgaccagagtgtttagagcagacacaggaatatacatgtctactttgatactgttttggctaaagtgacatggccatttgcttgggaggactttttcctctgaattcagttaaaaagaaaaagtctcatcttgtgtctcattctgcagatttttttctttttgtattatgtagagtacttttcccacttctaataatccagctactttttttctgtcttaatggtttttacacaggtagctattagtgtagacttaacacaggcagaggcaggcaggtctctgagttcaaggccaccctggactgcagagtgagttccaggataaccagggctacacagagaaaccctgtctcaaaaaaaagatatacatgcctctggatatttttggttacgtgtgaacctgtttgtgccttgctgtggtccactgaatcacagtgggctcaggcaagagatgacatagtggcagatgggaagtttcattgctcatatatttacttctaaaataatataaggatggttttgtggttataattccagcactatatgtgcaaagggaattgtacttttttctttctttgcctgatatttttgtggtaattggtaattgggtgtatgcatcctgtgattggcccattggggtttaagtttccatgtttattttccctccacttgtcagatcaggcttaccttgaactcagagcagtcctgcctcagtctccctagtgctgggactacatgcatgtgtgaccaaacttagcatttctttgtctttttatgcctcctaatcgagatctggtaaagttgaccttagatatggagtctcactggcctctaacctaaagatagtttttaccttccttagtattgggattttgaccagggtagttaatttcagtcatcatttctaaactctaaggttgtcatatctgtgattttcataccttcctaaaggtgactgtatagaacttcagttatcaaagaacacaccccccacttccacagagcacagccgatatgtggagcctcttgtgtcctgggaacagagtggtcatagtgaatgcacactactttcccagcagggagtttaaagttttaggtacattcttaatggcatgtgtgtatgggggtgggcacagtagtaaagaaagtgccaacatgactgactgctccatgatgtggttaaggtttttattagatgaacagcagccagcaaactgggcatggccagggttctgtctcttgagtattgtggtatagttagttcctatgttgtgtgatataagaaacaaaggaggtagtggatgcctcctagctccaggtattttcgaatgttttgtatactggccctatggagtagtagatctggggaattcttgtagtttgtttgacttggctataaaattgtatgtgctggaggtagggtggaacagagaaaagtccttgcatcgtttcttgtcatttcccttaacaaagctgtgccaattcctttgtctttacaggtattgctcagaagaaaagatgtttggttttcacaagccaaagatgtaccgaagtatagagggctgctgtatctgcagagccaagtcctccagctctcggttcacggacagtaaacgttatgaaaaggacttccagagctgttttgggtaagattagttatggtccctcccccaccccattacccctcactctccaccgaggcagggtttctctgtagcttaagagcttgtcctggaactggctctgtagaccaggttagcctcaaactcacagagatcctcatgagtgctgggactaaaggcatgcaccaccaccacccacctgtattccattcttagagggaaaaataatcaggattgtgtggaaatgtttccatgcaaagcaatggaaacaatgtgctaatatttaaaatcactagttttctattatttgggttagggaggattcatattctttttggtttttcgagacagggtttctctgtggctttggaggctgtcttggaactagctcctgtaggccaggctggtctcgaactcacagagatccaagtgctggggagaattcatattcttaaaatgaatctaattagctgtgaagccctttatggttacagttgggcaaacccctttgtccttaactgtaggatgtacaagtagattttcaaaatgtatccttactctcttaccagtagtagtcctccagtgttgtcttcacattgtgtttgtctccacattgagttacattttaatttgcggaggataatagtttgccctggaacttaaccccagggtatgttaactttccaacagatacttgggtgaaataaaatatttaatgttgaaccatttcctatagtatgcttgaggaagagagagtgcatatatatgcatttgcatgaggttgattttgattgattaaatggtcactttgtttttaagacagggtttttctgtgtagccctggctgtcctggaacttgctttgcagaccaggctgacctcaactcagagattctctgcctcctgagtgctgagattgtaggcatgaatcactacagctcgtactttgtacactggggctggagaaatggctcagcagttaagaacactcgctgctcttctaggaaccctggaaccctggttcagtctccagcaccctgtggtaactcaactgtctgtaattccagtttgaggattgaggagatctcttttttttttttggtttttcgagacagggtttctctgtggctttggaggctgtcctggaactagctcttgttatactagggtggtctcaactcaacagagatccgcctgcttctgcctccggagtgctgggattaaaggcactcgccaccaacacccagcggtttgaggagatcttacttcttctgatctctatgtagcaccagtcacatacatagtacacactgatacacaaataaataaatctgacttggttgattttatttatttattttgatttgtttatttattttggtaggctctcactgtgtagttttgcttgtcccggatggaactcactatgtctatatgccaggcaggctttgaactcacagagatccacatgtcctgcgtcccaggtgctgggattaaaggcgagcaccactacacttggctttaaaaagatttttaaatggaatgtgttggcatgattgataggtctctagaagttaataatttttaattgaaaatttcatatgcgtgtgtgttttgatcaaatctacccttctctttccttcccaccactnnnnnnnnnnnnnnnnnnnnnnnnnnnnnnnnnnnnnnnnnnnnnnnnnnnnnnnnnnnnnnnnnnnnnnnnnnnnnnnnnnnnnnnnnnnnnnnnnnnnnnnnnnnnnnnnnnnnnnnnnnnnnnnnnnnnnnnnnnnnnnnnnnnnnnnnnnnnnnnnnnnnnnnnnnnnnnnnnnnnnnnnnnnnnnnnnnnnnnnnnnnnnnnnnnnnnnnnnnnnnnnnnnnnnnnnnnnnnnnnnnnnnnnnnnnnnnnnnnnnnnnnnnnnnnnnnnnnnnnnnnnnnnnnnnnnnnnnnatcacctctatgaatcataagtggatgtatttccccaagagaagtatccacacaggaatcctcatgagggaaaagcatgataactaacattctgttttcttttcaggttgcacgagactcgctcaggagatatctgcaatgcctgtgtgctgcttgtgaaaagatggaagaagttgccagcaggatcaaaaaaaaactggaatcatgtaagttcatctctctctctctctctttctgagacagggtttctctgtgtagctttggagcctatcctggcactcactctgtagaccaggctggcctcaaactcacaaagatccacctgcctctgcctcccgagtgctgggattaaaggtgtgtgccaccaacgcccggcttgtgcttactctttttatgtcgtgtaacagttaaaggtacacacgagccctcagacactcttgaggataaaactgattcttaagtaagcatgggcctaagtggtgttaaatattcagtattttcttgcaggtgtcacactcaagggcaggacccagtctaaagacaacattgaaaccaaagaaagtgaaaactctatctggaaacaggatgaaaagcaaccagatcagtaaactgcagaaggagtttaaacgccacagtgagtttgctgttgagtactagtgctgtttcagtatcttaattttgactggggctggtttacagtctgtgtgaatccatttcttacttactgtctactaagttctgaggtggtcgccttccttttaggagtcttagcctttggaaggcactgttattgactttgggaatatgttcttatttctgtgaaatataactctgatttggtatcttaaagtaactaaaggggcttgggatttcctggagtagataaatagcttgctgcaaaaaacatgaggacttgagtcagaccctaacacccacataaaagctgagtagagcttgcaagggagcttatctggaaaggcggttgctgcccaggcctgactctatgaccagtgtgttaagagagaaccagctcccacaagttgtcctctgacttctacagtgcaccataacatgtttatgcctgtatacatacacaaatcaatgcatcaacaaaaagctgggctaacacgcttgcctgtgatcacagcactcaagattcagagattagggttccctgggacagggtgtctggcagtgagcactgggttcagtgagagaccctgcttcagaagccagtctggctttcatatatcatgggtgaacatgtacacggacaaaaacaacattcatagtctctgtctctgtctctctctctctctctctgatggcatgtgagtgtcatttgtactgactttgtagactgtcagaggaggttgtggttatatattcagcttagactttgaaaagggaagccccctcttattactacctgtttaactctcaggactcaaggcaaaactgctggattaaacacatgagtatttcataataagaatgtagttgtttgcagtagaaagaattgctgggttgttatctttttattcatttagtgtgagtcactactacaataaagataaatgtttggaggttctgattcaaagagctttgctcatgctctcttgttcgtgcctaactaatccttacctaacaatttcagttttacactgtatgtagttgttatatatcttggtgtcccaaagtcttagattaaacctaaggatgttgcagcttttaaatgtaaaaatggtatacactgaaatttcaaatagtttcaaaaaccctgagcatttacagtgatcctccctcatgtagaaactgttgatgttattgtgaggtttaaatatcctgctagatcactcctttcaggtaggattctcttgaaaattttttcttcaggaagttgaataccatttattaaagtgaattagcatattaataacacatgatacgttataacaatactttattttagatgtttaattttacagtatctatgtaagcatgctttaagaggaacttgtaagaaccttgtgattgtaagcttatttttccttgtaatggtagagctcacacccagagctttgtgccaggaaagcacttcactactgaactgcaccccctgcccttgtgagcccgccagaaaaaatgttttagtgaggtcggagtgatggctcagcgtgctactcttgcagaggagcttggtgcccatcaagcacccttaatttgctagctcataactacttctgactccagctccagggcattagataacctctggtcactgaggttgtatgcacatatgtgcacatgcaaaattagactaaagctttggtgtttaataaatatctaataattgtttctctgagttagaggactgttctatccatttcctagatagatgggaagtttaaatggtggtcgtgatctcctcagtactacagcacagtgactgtcaaccaaaaggttcattttctggcatttatttattcattctctggccaccctggaaatcacaatgttgactaggctatccttcgactcagatattgaacccacagatatggtgtgtaccacatgccctgatttatttcctggcttctaaatgcatggtgtggaaataatgctggtgtagctttaggctagtaaatcacctctgttccctgagttattttcccgtatagagaagtcagcagcacctggactttgcacgtgatgacactagaaatgtcttctgtgtttaatgcagactctgatgctcacagtaccacctcaagtgcctcgccagcccagtctccctgctacagtaaccagtcagatgatggctcagacacagagatggcttccagctctaacagaactccagttttttccttcttagatcttacctactggaaaaggtaaaaacatctgttcagagtcaccacttcatctcaaccactagctgcagtgttctatgtgttatacacagttgaaaatatttgacaaataactggtggtacaggtaggaagttggatttagtgggctttgatgagactggatgtaagacatacatcaaggttcttaaatttatgttgatggggtaaaactagctattctgacagctctaaaaagttatcttataggtgtcttgttttcgtttctgcttgctgtgataaaacacatgtgttttttttgtttgtttgtttggtttggatgttttgtttgtttgttttttcgagacagggttttttctctgtgtagctttggagcctatcctggcactcgctctggagaccagactggtctcgaactcacagagatccgcctgcctctgcctcccgagtgctgggattaaaggcgtgcgccaccgatgcctggttaaaacacctgtgttaaagggtttattttagctccaggttgtggtgcctgtcaccctggagaactgtccacatcactgtgaagagcagagaggatgtcatttgtgcttgtgctcagccagcattctctactcttcacttctaggatcaatgccacccattaatggacaagttttccgacttcagttctagattgtgccaggttggcagttaaaactgtcatggtgacaggggacacccaggccatgtaaaatgtagatatgtggccagataccaaaaagagacaaaataattagaaaagagaaagtattttcaaagaaaaagtaggatccctaggacacagaaaacatagataagacattttacctgtagacatgtctagagctacaaaatatgaaggacagtctaggactttacggagaaaatatactgctttcacaggaacacccaagatgcaaaggtgaattctttgaaacattcataaaacaatccagaaaccagtatattaatgtcttcagacggctaggagatagctctgatcgaggtgtggtggtctttaatcctagcactagtgatatagaggcaggtggatctctgatttcaacataagagccaagaaaattacattagataaaacaaaataatagaaaccaacccatataaatgaaaatgaaagtatagtgctacttgcagcactgaaaggaacgttaactgtgttagcttgaggttgatctttggtctcagcactggggaggcagagacaggatcccagggctttgctagtgaattattctagccagggtggtgagcttcagttgaggtattacctcaaagtaaaggtgaggagccactgaggaagacatcccatcctgaaatctagtttacacacacacacacacacacacacacacacacacacacacactctctctctctctctctctccacatcaagatgtannnnnnnnnnnnnncgtatgtcaagaaaatagaagctgtggtgttggaaagatggcttggtggacaaaggtggctcctgttgaacttgagttctaaaaatctgtgctgttaacatatcttctcctttatttcagacagaaaatatgttgtgggatcatctataagggccgttttggggaagtcctcatcgacacgcatctcttcaagccttgctgcagcagtaagaaggcagctcctgagaagcctgaggaacagggaccagcgcctctgcccatctctactcaggagtggtgactgaggttcatgcagaagggaacaaagagcaatttaaactttgaaaagaccacaaagcaacagactgaccctcctatttttaacttggatacctgctattctgccaaaagacattttctagaatagtttttaatgggttacccatccccccatccaacaaactcggaagccagttctagcttactgcaagaagagagtgtacataatatttaatatgctgagtatttcataggaaggctgaatgctgctgtaaagtgctctttaagtctttttttttttttaatcccctctaatgaatgagattaggggggtttcaggggacagagatgggatttgttgtgtgataaaccatatgtagtttagtctttctgtggagaggcagtggttggggcattttaaatggctggctacacttgttttcccctcatggtaatttgtcataactcagtagcacgacctgcccctagaagtagttaaagatttttaaatgctaaggcgttgccaaggttctgatgattcagacctgtactactgattattaagcaggacagactgagctttctgcaaatagcttgaaggaggaagcaatatctgaacacacaggtagcactgtgttggctcccttcatggtaatatttgataaacgtcgttatgtgagtcttataaaacagaaccaccggggctccttctggggaaggcaagcctgtaggatgggcaaggtcctatagggatagtaccaaagcatcaccattcggcagagaacgcgtggttgtaaactacttaacagattgtgtgagtcctggggatgcgcggggcacagttgatgctgcttggggcacatttcttagagggcttgcattgtgtaaataattgacattggtgttacacaactgtctgggattcactgaaatccacacgattcagttctagctctggattacctcagttgacctttgtggaggttttatctatagagtagttctttgccttgtcataaccttattagggttttaggttttgttgttttattgttttgggtttttttctctcccactatttaaagttgattagaaggaaaaagagttgtgtgttgaggctgagttggttgggttggcttcttggagttgggcttctgaacatcaagatggctgaatagagctcctcacattgagatctcagcaagggcctctcagtagatagagagagccctgtggaagttgtctgatggccgattctcaaagttcaggaaaaacaatagtgccatttcagacctctcctagagggaggggggtatgtggctgccttagtattcctcactcatgattattttaaaaactggatttttaaagtctgttagttttcacaacagggagggccgcagtttgtggcatcctatagttgtgtagtttttacattgtgtgtctcttcccttttgggaaaaacctacctagtacaagccaccacatgcacagacggcccagtgagtgggtttgttttccacagccttggtgtgttacagagtccagccattaccattctcctgcgttactttgacatgggattgtttttgtacattttggctgcagtattggtggtagaatatacttttgatggatcatctctacttctgtatttatttatttattactagacctcaaccacagtcttctcccctccactctctgcctgtaggatgtactgtacgtagtcatgcactttgtattaatatattagaaatctacagatctgttttgtactttttatactgttggatacttataatcaaaacttttactctagggtattgaataaatttagtcttattagaaaataaaagtagctgttttgtgatttttgttttgaaggtctctggtagcaatgttttttaggactcggagagatctcagtttgttaaaagcactgactgctcttgcataagacccacgttgggttcctagcacccatatgacagttcaaaaacatctgtagttcgagttccagggcctctgatgcagtctggtcttcttgaggacaaggccgacacatggtgcacagttagaggcagacagaaacacctagctcccacaattttcctctgacttgcacacatatgctctgtcacactcaggccatttccctgtccttagtgtgccaaggttcagagtgcctttctatacagaatgtacttctcagactatactacagcttaagaaatagcacattcctttttctttgagctggaaagtttgtgtggactgtttacttcttataatcaagaagtaaacacacttcttagtgtgttagggatcagaatgtccacttagaaacccaaatcaggcaggaactgaagcaggcaccgtagaggaagactgcttactgttttctttacaacccagtaccacctgctcaggagtggcactgtccccagtgggctgggccctccaacatcaatcattcattaatcaggaaaaatgtcccactgacttgtctatagggcactcttattaaggctgccttagttattgtctgttgctgtgaagagacaccacgaacaaggcagctgtcacaaaagaaagcatttaactgggagcttgcttacagtctgttaatggtggcacacaagcaggcatggtgcttccaaagtaactgagagctttacatacttagcagtagacagtgggcagaaagagacacgacctagcctagggttttgaaacttgaaggccctccatcttcaacaaagccacatctgctgacccttaccttagcaggccgaactgggaaccaagcattcaaagatatgaacctatggcaccatttttatttattgtcaccacagaggcaataagattcacttcccaaatagttctaggtctgtgaaatgggcaaacaaaccaactaggacaaattgtgatcgaacatacatgaatcatcatcatttttaagatgaagctctaagtttagagtgggtctcttaatttgtgtagcaaataggaaagtagatctgctatgaaacacctatgagccctgtaactttaaacatggataaaacatcctgtgtagttgtcttagttacttttctgttgtgaagcgatacatgatcagagcaacttgtaagcatttaattgggggcttgcttacagttttagaaggttgagtccatgaccactgtggtagggagcatggcctcaggtaggtgtgaggctggagttgtagctgagaagcttacatgttgagacaaccatgaactggagtagagagacttaaccaagaggaggggaaaggatgtgtggggttttgaagactcaaagcccagcttcagtgacacacctccaaccaagaccacacctaatctcatactctgctgccgcacaagcattcaaatatatgagccgctggggacattctcattcaaatcaccacaaaaattaatataaaacaacacagggctggagagatggctcaggggttcagagcactggctgttcttccagagtacccaggttcagttcccagcacccacatggcagctcactattgtaactccagttccaagggatctggcaccctcagacatgaatacaggcaaaataccaatgcatacaaaattaaaataaacctttaaaaaaaagcaaagctcttgcagctgagtagaagttcaaagaagagtatactctgcttttatgatttgtatttgctttttttctttctctctttaaaatggtttctctgtagctctggtagtcctggaactcactccataccaggcaggttgtcttcaaactcagaactaccctgctctgcctccccagtgctaggattaaatcatgcccagcagtatttgctctctttctttttaaataatttgtgtgtaactagaaaccccagggtccctcctgcctccacctcccagcactgggattatagctgtgccgcactgtgactgtggggactgtttgtgaatactagggatctaaactcgagacctcgagccggagtcctagatttgttgttgtttgtttgagacagagtttctttgtataactttgaagcctgtcctggtgctctgtagaccaggctggccctgatcttacagagatccatctgcctctgcctctgcctgagtgctaggattaaaagtgtgtgctgttactgcctggccctagtttcattttttaatctgatcttggaaaagtattgtaaagcttcctggtggtatacacctataatcccagcacttggaggtggagacaggcagatcacgattaattcaagaccacctgaggtacactgaacgagggccacaatggacagcctcaatatgtagccagaacttaatgcctgctgtgtaatgtagggctgaagctctccaaggaccctcttagaacagtgacccaggaaaggtcaatgaactgggactggaaagggaggagacagccaaattggatcaaaggtaggtaatttcacaggctcatttgtgaaagaaaggtaccagaggatcctcttggttgattatctagctgtggagtttggttactcatagttggtatcatgttccctacaccctgagtaaaggctacttattgtagtatgttgagtctagaggccttagacaagcccattcatttgggtagaaagtgactaaaattggagctgcccttttgtctccatgtctgcaaagggggaaatggttctgttttagaatgtctatactcatatagcttacctacacttaacttcaggtgtgggaaagatggggtttatgcttgtgtttatgattcagtctcaataatagctcagcagcctcaagttgtttagcaggtgtgttagaaaaggaatcaatggtgctgttgttttaaggaacaccgtatgttcctggtcgtgagctgctttcacaaactccctgttgattgtccccaccactcaaggtccctgctgactttgctgtgggaaatggcattacaatcacctctctgcaggtgacctcaaagggcccctgagctttaacaacaaattacaaactcagctttaattagcgcagagttcgcctggcctcagactcacaaacttggctgggggcacaggatgtaatccccaaattcaataacaaaaccatctcatagattgcaaatgggctaaattactgagaaggctattggggaagagcctgctactgctgtccataaactcagtggattttcttcccgtgcagtaagatagatacgaatgcccaccaggtggcgctagtcatgaaacccgaagaggacattgtaggcatcttttttaaagacaaggcctctgtgaagctattggaagatgagggaacctttaggaggcagaaccaagcaggagaaaggtaggtcattggtggagctccctagaaggagacacggatcctgaaaatcctatcacatcagggcctccctccccccctcctttcctctctgttcctcatcttcttcccctttttccatttccctagcttctgtgttgaacaacctcatatccctgcagttctgcctcttcgaaggcccccaaaagcagtatatgggttgaaaccaaaatatacttttccttttaataaactgacacttttcaaggtattttgtcacagaatgcttacatacctttaagaaataagtaatagctaccttcaaaactccttcttgataagtacaagtgacagaccaatataacattttgataataaatcatttttattttaagacagggtctcaaccaggttggtggtggctcatgcctttaatcccagcattcaggaggcagagggtcaaattccagtacagccagaaatgttacaaagagaaaccctgtctcaaaaaaccagagagagaggaggggttggggatgggaattaaggaaacactttcttaaaaaataaaatactttattgcctttattttagataaactcactgaatggtcaccttcgtgttttaggacaaaagtgtaatctgttgcttcacccatagttgaattattccagcccaaatgtaaactttaaaaatgattttgttttggggctcgagagatggcttagaggttaagagcactagctagtcttccagaggtcctgagttcaattcccagcaaccacaaggtggctcacaactatctacaatgagatctcataccctcttctggcatgcatgtatgtataataaataaatcatttaaaaaatgtaaaaaagtttaaaaaaatgattttgtttcctttttattgtgtttttatatatgggtgtttgcctatatgcatatgtcttggactccctggagctaaagttgttggctgccatgtgggtcttgggaatagaatctgggtcccttgaagaataagccacactcctaaactgctgaacaaaccctcctgccctaccctcccctttgcctccaacaggatctcactctagcccaggctggcctcaaacttgaggcaaattcagggaatcctgcatgtcctagccacttggctgttgggattacagcataaaccaccatactcagtttacaatgtgttccatttgtctggccaggataatgtaggttcttactatgaaataggacagtgacagttacggctaatgcctatagcccctgaacttgagaatcaggggcagtaaactcatagcttcaaccatgacctctttaaaattttttacaaatttatttcaatgttaggtgcatgagtgttttgcctgtatatttgtgtactgtacgcattcctggtaccttctgaagttggaagaggtgttggacccactggaactggagatacagagagatcgttagctgccagatggatactgggaactgaactcaggacctctgcaagaacagccagtgttcctaactgctgagccatctctccagcccctctttcttaaaaagttattgcacttacttatttataaggtagaggtgtatgcctggtgcaatctgcaatcacagtgatacactttaaattatttttaaagagattcatatttttgtgtttaattatgtgtctgtcgtggggtgtgtgtacacattgagtgggggtgcccacagggaccagaagagggtgtacacacccttcccagacagacacataaacacataattagacacaaaaataagaatcttttaaaaaaataacttgaagtacaccactgtgattgcagattgtgctgagaatactgaactggatatattatcgtctatatcaggctttccaggctgctgtgattcttttattatttttattattatgattttaagacagggtttcatgtagcccaggctggacttaaactcactatatgtagtgacaaagagttttgaacttctgatattcccgtttctgcctctcaaatgctgggattataggcatgctctgccaaagctggtcaataccttgttacctttaaaaaaatgaatattttaaaacatttattttgtgtgtttatgtgtggttacacacatgtggaggtcaaaaaactgcccgggagtcagtttttttggttgtttttttgagacagggttttctctgtgtaacagctctgactgtcctggaactagctttatagaccaggctggcccacaactcacagagatccctctacctctgcctccttgagtgctgggattaaaggcatgccctgccactgtctggtgggagtcaggtttttgtttgttgtttttatttttatttatttattttttgagatggtttctctatgtagccctggctcaggatccatatgttgctccagtcttcatcatcaaatccagaggtgtgaggtctgctttggaagaagagaagactgtaccctgaagtagttgtaggccttgactaacctgtgtcctcgggaactgcagtatacgtatagggttggatcccagggaaagggaacagaatttaaaatggaaaagggagagtttcaggatacagcattgatgcactggctgggtgtccaggagatggcgctcatacactgtaaagttgtgccttacaagtattgatcacatgacgtgagggaccttggaagctctgctcgagcaaataaatagacaaataagtgcagtgaccgactatgccgcaatgcatggattagggctgtgttcagtacacagttaccggggaggttggagtaggaggaccatgagttgaagaccagcctaggtaatttagtaagaccttcaaaataaaagcataagaagaggagaagaaagggaagggggctaggaaggtaggaaggtggagtgctgggttagcatgtgagaggccccttggtttgatctcaagtgcctcacattgtacaggctataaaacccaccatcactcatgtagaatgggagactcaggatattgcgcgcacacacacacacacacacacacagcacacagnnnnnnnnnnnnnnnnnnnnnnnnnnnnnnnnnnnnnnnnnnnnnnnnnnnnnnnnnnnnnnnnnnnnnnnnnnnnnnnnnnnnnnnnnnnnnnnnnnnnnnnnnnnnnnnnnnnnnnnnnnnnnnnnnnnnnnnnnnnnnnnnnnnnnnnnnnnnnnnnnnnnnnnnnnnnnnnnnnnnnnnnnnnnnnnnnnnnnnnnnnnnnnnnnnnnnnnnnnnnnnnnnnnnnnnnnnnnnnnnnnnnnnnnnnnnnnnnnnnnnnnnnnnnnnnnnnnnnnnnnnnnnnnnnnnnnnnnnnnnnnnnnnnnnnnnnnnnnnnnnnnnnnnnnnnnnnnnnnnnnnnnnntgggggagtgtaggtggtagtgggatataatatcactagtggtactgggtatgtggctcctggaacaccagaggcctgtcaagagcaggatagagcttcagatgaacagacaaaagcacttggccatggacatagaagtcaggatgggatcggtcaggaggtatagctccactatcagcccataaacactcagtgaggccaagccttcccacctgaggtagatttgttgttttagacaggatctcattctgtagcccagggcatcctacatttaggccaaaatggcctcaatttatagagctcttcttgtctcaacttctccagtgctgggattataggtatatgccaccacaccattgatagctgctcttagatgtccctgccatcttttcctataggtcaaactaaacccatgctgtccaaactctgggcttctcatatcattatttagccaatgttaccgaccatatttcagaaactactgctgttgtttaatccatccctgtgtaccaacatttcattatggcccatgcagttaacctgatgtaagatcgttgcttatgtaaaatgctaagcatttcccttgcttgtctctgcttcacccttgacttacaatttttatttcacactgcagccaaagggtcttatacaagaactaagactcagattaaaacatgagatcacctaataatgctgtttaatgtcctctcttcatttcccatcacactttgaataaaaaaccaagcctcttccatcaccctcaagaccctgaatgaccttgacctacctctctgttctattttctttttctttttattttttattttattttccttctggcttgaagctcgactcacattctctctctgtctcataaaaaataactcaagcttaactccacctactcctctaagtgttcttactgagatgcacatggagcctgttctatttagaagaagggttgaaaaggataattaaatgtttttcttggatggtggtttcattcaccagagtgtgagtactggggggagaggaaggaggaacttaagaattgtgtcactagctgacatttatagggtgcttggtgctgttagcctatgctgcataagaaatgaaccctagatttagtgtttagtagcttaataaaaccttattgttattattattattattatttttaagacagggtttcacttatgtagctgagtctggcctggaagtcacaaagctcctcttgcctgtgcctcctgagtactggtatcaaaagcatataccaccatggctggcttaacacagcttttattagttcaatttctgtggatcagggatctgtttgtaggttggctaggtttctagaggcagttaaaacaccaccaggaaggatcagctgcctactcaagactgttaagtgggcgaggttccttgcaagttgttctattgcggcttcattttctcatagcctggtggctaaaggcttggcccagctcctcaccacacaagactcacaagactcactggagggagatgagattattagcaatagaaggagggagtaaagggaataaaggaaaaagggggtgggtgggaaggagaggaaaaggaagcagtatcagtgtgtaagctgatgacctaggaaaaccattggtagagtttccttctggctaacgaaaggcctgaggatgaggaagcacatgtcagtgggcaaaactgatgaaagtgactgtcctagctccagcagagtaaatacattctttgttctgactgtgttctcagtggcgtgggtgatgcccactgcagagatgagtgtacttttcttcactcagtccatagttcaaatgctaatcttttctggaaacaccttcacagacatagacagatgtaacattttttttccagctatcttcgcatctcttagcccagtttttattgatataaaaaaaaatccaccatcacttttgttatattccatgtttcaaaaggaagtcattatgttcacacttaagggaaggtgtcacacagatctgaatgaagactcagagaccagggggaactgtgtccgaagctgcctaacatagaacttgaacttgccatccttcttagcttcctgagtgcggaggtgcctggggtctactgactcagcacctgcattctcagtgaggtggctggaatgtgaagtaaaagctggattgcttgagagaacagtgggttggcaggaaaaccggaagaagtgattccctagcattgagagaagagtctaagttaacccttaggtagctcctggtgccaagaatagttattcacgtgttccttctgtaaataataagacagatatggtgctgcataccggcacttgggagagtgaggcaagaggatcacaggcctaaggttggcctgagctatatctcaaaatacgaccacccaccaaagattcaaatattttgctcatcgtcaaatagttgctggaagagtactattctgggcactgtatagttctctggctttaaagatgaaatataaattggaaattttgaataacttcctcaaatcatttgcctaactgtcatttattaaaattcgaatcctctcactattaaatgtagcactatggagtgctgtgatgttagaatataagcaatttgtaaattgtttgcacatattttaactattctttctactttgtctttctctattatctacttagcaatcaaagtgtctcctccacttaacatacaaagttagaaatactttcacagtatttgcagttaaggtccttttcctattactgttgcttttcctgcaatcaagtgcagaatgacaaaattctgttttctattttatcaatacatctgctgtgttctttcgtttggttcactgataactcactatgatttaatttcagagatgtcaaattcaatactattctacaagctatacaataatcaacttctccaaatgaaccataagttaaaaccaaatttaagccgggtgttggtggcacatgcctttaattccagcgctcgggaggcagaggctggaagatctctgtgagttcgagaccagcctggtctacaagagctagttccaggacagcctccaaagccacagagaaaccctgtctcaaaaaacaaaacaaaacaaaaaaacaaaaaaacaaacaaacaaaaaaaaacaagcttaaactacttttttcttcatttgtctacaacaaaccaaagctcggtagttcattttagtaagtacagtgggcagaattcaggagtttattggtaagaagtcttacgtagagcacagagaagacaaaagaaatcacctatttatctaatttataatttatatttggagagtataattgaaaggcagcctggtttctttttaacaaaatacttaaagtggaagaacaatgttgttctgcatttagtatttattaaataacaatgaagagaaataggttgtaagaacctacatataaagtatcgaacatctgtgatcctaatactcagtaggcagaggcatgaggatctccacgtgttcaagtttagcatggactacatattgactgggtgggggtacatagtgagaccccaccttttaaaaaaagctaaaacaaactggtgcatgcctttagttccagctcctggaactaaagaggcctgcctctgcctcctgagggctaggactaaaggtgtgcgctatcactgattggctagtataatcagtttctaaggaataaatttgacatgttgatgatttctccatttattaggccaattttataaattttcatgttgtagctatggtaacactctgatgatttatatggctatgccagagccttcttatttgtctattagaattgttaagaccttcctttacaaaaagtgctcgttatcctccaaagaacattagcatcagggattaactttaaagaattaaatatgcaagagagttcacatttgaatcctgaaaatgctctgtgggcctaaatgagtccagctggcaaagctttagtagccttgaaaccattactgtgtgactcaggttcagcttcctaaactggattacaggctaaggctggttttttttctttcccttccttcctttatcatacttcctacccccaccttccagatagggcttctctgtgtagcttgactgggcttgcctcaaaattgtggcaggccttctgcctcaatctcccaagccctgggattataggcatgtactaactcttagtgtatttctgggtacttgagtctgtgaaacatcatatccgctgaacaccacaatgtaacttggaggtttgccaggagacagatcccttgagccacactttggagaatctaactgggctctggcatagacctttgtgggttttgtttgtttgtttttgatttttttgagacagggtttctctgtgtagcccagtctggcctggaactcagagatccagttgcctctgccagtgttgtttttactaaatctcaatcattcgattttgccaataaatgctcggccagtaggtcaggcttgttactagctaactctaacaaaaaattaacccactcactttaatctacattttgccatgtggtgttacctctctttcatcttgcatttcctatttcttttttgtgtctcgctgatgactttcactctgccttcttcccagtgtccttagtctggttctcccacctaaccttatcctgtccagctattggccagccagattctttattaactgaatctcagcaacatatagtcacacagtgtaaaggaatattccacagccttttccaaaacccattgagctgttctcactggccctctgatctctaaattttgtttaaacatcaaacaaacgctacataggctgctgtgaagaaacggtgcgccttaactagaaaagatactttgtaactgagaacattatagtttgagtatacaatgacctcaaaggctcatgtgttggaggtttggccctcagctggtggtgctactgagaagtgatttggttatgaggatnnnnnnnnnnnnnnnnnnnnnnnnnnnnnnnnnnnnnnnnnnnnnnnnnnnnnnnnnnnnnnnnnnnnnnnnnnnnnnnnnnnnnnnnnnnnnnnnnnnnnnnnnnnnnnnnnnnnnnnnnnnnaatttctggtgttaccatcatagcgaaccgaataacaatccaagggatgtaggaaggtagttcagttcaacaggactaagtagctggtgttggttcaaacttttggagtctgaccccaagtagttcatttgaatcacatttaagcacagcacaagttggtaaaaactttgctggggataattaactcaatcctatgtgtataataaagtacaaaataaagattgcatgtgactacatcgagagtctttgaacagtacatgtgaaaccttccataaagatgagacgtatagattggttacatggggaacttttcataaagatgggttcaattagctggacagtgatggcgcatgccacagaggcaggcagatctctgtgagttcaagaccagcctggtctacaagagctagttccaaagccacagagaaaccctttctcaaaaaaaacaaaaaaacaaaaaaacataaaaaacaaaaaaaagatggattcagtggattgactgataaaaacaagttcacgataagggtttgggagaagttctactttctgggtagataacaggttatggatcacttcctgtgtagcaacaaccctatgtgtttaacattccaggcccccctagtgcttatctgtgagcccaaggacctccatgcctctgacatctgggatccttttgcttctgtctctggagtgctgagatgataggtgcatgtcagctcactggctttcatggttggagcttgtccttgtccttgtctctctctctcgggatggatttcttgactgccatgaggtaagaagctccctgcaccgaaatccccacaagtccagcagacccagcaacagagccactggtctgtggaagggaacctctgaaattgtgagccaaaacaaatattcaatccttctagttgctcatcaggcattttgtcatagcgacttaaagtcactaaagtgacacttaagtaggtggggacaccaaaagcagttgtcctggagaaggtgctactccagcctggagtcctgtgtgttcctacttgcagcaacacctgttctgtctccttggatgtctgtagagaagcctgggcatctccagcggcatgaagcatgtaagtggagatctgtactcttctaagatgggggggtgtcttaataacttttctgttgctgtgaagagaccatgaccgagcgagagagaaactctgtcttgaaaaaccaaaaaaaaaaaaaaaaaagagagagagagagagaccatgaccaaggcaacttaccatcattttgggaagcaaggcatggtactacatcagtggctgagaacttacttacctcttttttgttttgttttgtgttttgttttttgagactgggtctctttacatagctgaagctgtcctagaactcactatgtagatcccacctgacaagagcttacattttatccacaggaagcaggcagagactaggtagaggtgggatgggcttttgaaacctcaaagcccacccacccctagtgacgtacatcctcagtcaaggccatatctcctaatgcttcccaaagaaccaattttgccattgaagttttgagatttcacttgggtatatgttagcatggatcttttcacacttttttcctggaaatctattgaatagatttttcagtttgaaaatccaagactttcctctttggtggccttcaagaacctttcaccggttgtatatttttctatttcatatgaaaatcagcatgttagtttccttttattttccatgtcctgtaggttgctaacctgtaggaagaatatcattctctcaggattcctgctgagattacaggaaatattattcaaataattcactgaatttattctggtacagacagtcacttcaaagctttaatgagtgtggcatgatttaaaagaggctaatttccaaaagttaaaaataatattatgatggatgacgcaaatggagagccatttatatcaaagagtcaaaagctcacttgccacaggggatatagaacttgtttttgcaccttcttctagctaatttttttcattgtgatctgtagtgtgtgtacacattccttcgtgtgtgtgtgtgtgtgtgtgtgaagacagagatcaatgctgggtgtttcctcatgttgtggaataatcattttgtactgtgaagatgtgtactcagattggtttaataaaaagctgaggggctggagagatggctcagaggttaagaacactgactgctcttccagaggtcctgagttcaattcccagcaccacagggtggctcacaaacatctacaaagagatctggtgccctcttccggcctgcaggcaacatgcaggcagaacattgtatacatagtaaataaaatctttataaaaataaaggtacatgcctttaatcccagcacttgggaggcagaggcagagacaggtggatctgtgtgaattaaaggccagcctgatcaacagagcaagtgccaggagaggctcaaagctacacagagaaaccctgtctcaaaaacaaaaaccaaccaactaaccaaacataacaaaacaaaacaaaaaacaaaaaaagaagctgggcattggtggtgcacgcctttaatcccagcactcgggaggcagaggcaggtggatctctctctgtgagttcgagaccagcctggtctacaagagctagttccaggacagcctccaaaagccagagaaaccctgtctcaaaaacaaacaaacaaacaaacaaaaagctgaacagcccaaagctaggtaggattttcggggcacagaggatgctaggaaaaagggccaagttgctagctggacacagaggaagtaggatgttcaggaggagagccatgagccacatggcaagacacagattaatagaaatgggttaatttaaattataagaactagggcaggtggagagatggctcagaggttaagagcattgactactcttccagaggacctgagttcaattcccagcaacctcatgatggctcacaaccatctgtaatgagatctggtgccctcttctggcctgcaggcatataagcagacagaacactgtatataataaataaagaaacctaaaaaaaaaaaaaaaaaagttatatgaactagttaggaaacaagcctaagctatactctgaacttttataattaataataagtctctgtgttgtgatttgggagctggatggcaggacagagagactacactttcagttgtcctctatcttattttttgaaacagagtttcttgctgaaactggaactcctcactacttcagctagagcggctggcctgcaagccccaaagctcctgtctctgcctctctattgtttagtttacagacacatgctcagatcttcatgcttgtatggcatgcacttattggctgagccattttcctaggttgtttttatgagagaggttcttactttgtagactaggttggtctccaacttgcaaagattttcctacccaatctcctagatgctgggattagagacccatgccacaactggctgcttgataataatcacaaaaagaattcaaagaacttcaaaatgggcaggtgaaaggtgatactagaaagagaacaaggcaagtggcagccagggactactcgctgctctcctgagggacttcaagggtgctgaatgggaaagcataatgtattcattccagtcctacaaatagcatacataaagctactgaaatttgattataatttgaaggaaaatatcagcccctcagacattaatcttagctgggtgtagtggcacatgcctttacccccagaattcaaaatggatctccatgagttccagaccagcctggtctccatagcaagttctagaccagacagaattcaaaatggatctccatgagttccagaccagcctggtctccatagcaagttctaggcctcatattgattaaggtaattagtgtcttattgatagatttattaataattcttctattgaatagttagggttatagttagatataatggcccaaatgataattatgataattctggaaatcttttgttttaggagggggaatcagtctccctctgtagtccaggctgtactgaaacttgggatcttcctacctcacctcttgagttctgggaggtgtgtgcctgtaaaggtatgtgcctaaaaaggtgtgtgccaccatccctggttggaaatactattgttaggttcattattagcataggataacaaaggcataaatacgaatataataggtctgctaaattttcccaagatgtgctcatcacaggcttcatgtccattctgtgtggcaaagctgagagtgtattagtttttctcatctcatttcaccagcatgttctttatcaggttatgaacaaggaagaaacagacaacttaatgttcgtctaatgtccaagttacatacggggttcagaaattcaagctacaacacaaaattaaggtacataacaggaaagggaggagagatggctcagtggtttagagcactggctgcttttccagttacatctgtctgtaactccagtttcagaggacccaatgcccttttctggcacgcggcacccatatgatacgcaaacatatatgcaggcaaaacatcatcggtacacataataaaatagaatgaagcaaaacaaaaagaggtatacaataccaccaggatgaactcaaatggtaagtggcaggatatagaatcaaggaatgccaaagccaaagtgactttttattttattttatttgcggccttgactggactttaaactggctgggcctttgcttacttacttgatttttcttttgacggtcctgttctgaataattattatttcctcatggataggacttaaaatctcttgtgtttggtaaaatacttgtgggcaagtcattattctacatttattagttctattattttgtttatttagtttctgaggtagcgtttttttttgttttgctcaggcctgtccctgcctgcctaggattagtgagtaagccacccccacaaaacttcatttgatacaggaagccctaccagtccagaagctaacccacttcgtcttttccactaactttatgcaactcaataagtaatttcaccagctgtttcagtgccagtgtaatgaactgttgcatagcaacacatagccttgccgcacaccctcctatcacaatcgctgcagtcatctgttctgcttttgtggtagtgctgtcccaggggagaggacatggtgatcttcctcattccacgatgaaaaaaacaatcatctgnnnnnnnnnnnnnnnnnnnnnnnnnnnnnnnnnnnnnnnnnnnnnnnnnnnnnnnnnnnnnnnnnnnnnnnnnnnnnnnnnnnnnnnnnnnnnnnnnnnnnnnnnnnnnnnnnnnnnnnnnnnnnnnnnnnnnnnnnnnnnnnnnnnnnnnnnnnnnnnnnnnnnnnnnnnnnnnnnnnnnnnnnnnnnnnnnnnnnnnnnnnnnnnnnnnnnnnnnnnnnnnnnnnnnnnnnnnnnnnnnnnnnnnnnnnnnnnnnnnnnnnnnnnnnnnnnnnnnnnnnnnnnnnnnnnnnnnnnnnnnnnnnnnnnnnnnnnnnnnnnnnnnnnnnnnnnnnnnnnnnnnnnnnnnnnnnnnnnnnnnnnnnnnnnnnnnnnnnnnnnnnnnnnnnnnnnnnnnnnnnnnnnnnnnnnnnnnnnnnnnnnnnnnnnnnnnnnnnnnnnnnnnnnnnnnnnnnnnnnnnnnnnnnnnnnnnnnnnnnnnnnnnnnnnnnnnnnnnnnnnnnnnnnnnnnnnnnnnnnnnnnnnnnnnnnnnnnnnnnnnnnnnnnnnnnnnnnnnnnnnnnnnnnnnnnnnnnnnnnnnnnnnnnnnnnnnnnnnnnnnnnnnnnnnnnnnnnnnnnnnnnnnnnnnnnnnnnnnnnnnnnnnnnnnnnnnnnnnnnnnnnnnnnnnnnnnnnnnnnnnnnnnnnnnnnnnnnnnnnnnnnnnnnnnnnnnnnnnnnnnnnnnnnnnnnnnnnnnnnnnnnnnnnnnnnnnnnnnnnnnnnnnnnnnnnnnnnnnnnnnnnnnnnnnnnnnnnnnnnnnnnnnnnnnnnnnnnnnnnnnnnnnnnnnnnnnnnnnnnnnnnngtgggcggtggtgagttagtgcacatacaaccggaagccacctcggcaatgcagtctgtgagaaggcttggttggctaccgtgaccaggggtgatgcacttggttagtccctgggcagccaaagagacgttaacatgcttgttcaagaaacttgcttcacctagcctttgaggtagattgaagttgggggctaaagtaaaggttcaggtaaagaggtgctaatgtggcaaagtggtcgtactcccctcccccgcttgggtgatgaccatagaaattgttcagaaggagaaagtcagaagccttttgcttgcttggcagttcttctccgtgtgggaaattgaactaatggaaacgttcctatagtgtacattttgcctgcgagtagtctgtctttattggccattgctttcagcggccagttgatgcaagaacgctgaatgaagcaccattgtgttttgagttcatttttgtggaagaacattttaaaggaaggttttccagagatgataaaggttgctgctatgcacctttagtttacgtttatacttaactctcccccacccccaaatcttaagcgtcatctgtttcagtggtgcaactctcttcactctcttcatttcttttcggttaccagtcaccttcaggccattcagtggagggacaagtgggaaatatgaagtcagccaagccccatgtgacccacagtcagcacggggaatgcctgcaggccctgagccctctgcagtctactctcagttctgcttcatctccttcccaggcgtatgaaacgtatatcgataatggactcatatgccttaaacacaaaattagaaacatcgagaaaaagaaggtaactttttacccccaccaagccctgaatgtgcatgaccttaagccagggttaaggagctgacatattctttatcatcagagaacataggtcttccaaaagatttaactgaccttgagatttctttgcctgggaataattaagcatctaggctaaatgcttgcttcatttgccaacatagccgaataacaatattcttcacagtaaatttgttacacatactgcttttgaaaagtttgctgttttaggtctgattaatttcttgagatatattattgtttcttatcctagttccttgtgactgcatcaagtgatatggcagtacagcctctgcagtcattgggagcattttgtcatgagccaggaaatgctttaacatttttttccacagctagatactggtttaagattggttcaggaaagtgtggtagacagctttgtaaagagactttggatccttaccagtcctaacattacagtaaatggtatggtaaagatccagataatttctcatttcctcagtcagtccctagggatgcactgttgtgtcgtgtgtggttctcatttacttttgacaggtaaggctgaataagttctacattcttttaaaactgcagcacaagatctagtaaaacaagaggaaagttttttgtttgttttgtacagggatatgtagagatttttgatttttattgactgtatcttcccttgtgttgggaggtagcacagaagggctaatggtttttatcttttccatgcattttttttttttcccttcgagacagggtttctctgtgattttggaggctgtcctggaactagctcttgtaaaccaggctggtctcgaactcacagagatctgcctgcctctgcctccgagtgtgggattaaaggcatgcaccaccatgcttccatgcattttttgaatgcatgcatttagttactagtgtgactagatgattgtgcctgggtcagcacaggttccttaacgctgagaactagctcatgcagggtctgttagtggagagtctttagtgacattcctagtggacatgttgagtatgtgttttcctgtgttatccagctaaactgtaattacttctttaattctggatgtctgtttgctattgacagtgtctttgcttccagcttctaggtaagtattttaagacctaaaaccaatataggaggagcctgcaaaatgcttatgtcatgattatggggctaatagatgaaatttagtttttatgtattttcttaaataccaaaatttcctatgacaggtaacatcatatcttggtgcttctgttagaaagttaactattatgaaaatgctacacagttcaacaggtaacagtcagtagaataagtaagcatgaactacaaagtatgcagaactagtcagccatgatgctattgatgctttgtgctagatcagtgcttctcaaccttccttaatgctgtgaccctttaatacagttcctcatgcggtgatgaccctcaaccataaaattattttgttgctacttcgtaactgtcattttgctactgttatggattgtgataaataactgaaatgtgacccccaccccaaagaggttttgacccacaagttgagaaccactgtgctggataattccttgtgagaggctgccctgaacagtgtgggatatctgtcagcagtcttggcatctgcctaaaagatgccagaagcactgttaacctcctccagactctgcaaattgtgataatctcatatatctctgggaataaattggcctggctgagcacctctaggtaggggtatatggttgactttagaccctatttaagtagactgattataaatagaagccattaagaggttaaaaaaaataaaatcaggctgttgagatggcttagctggtaaagctgcttgctgtacaaacccgatgacctgagtaataaccccaggattttgcagtggaaggagatcatcagctcccaaaagtcctcagacctctatacatgcactaataattttaaaaagattcggggctggagagatggctaaaggttaagagtatgtacagaaagctgggcatggtggctcatgcctttaatccctatacttaggagcaaaggcaagcacatctctgagttcaaggccagccagggctatgtagaaagaccctgtctcaagaacaataacagcaaagagtacttacagttcttttagagaacctggacttgattcccagctcccacatcagacattttataaaccctccatttggtggtgctgatggtggaggagtactgtctagtgatgactctgacctcctggggcacctgcacttatttgcatataccctcgcacagatacacataattaaaataagtcgggcttggtggctcatgcctttaatgctaccactaatgaggcagaggcaggcagatctctgagttcaaggccagcctggtctacaaagcaagttccaggacagccagggctacacggagggatcctgtttcaaaaaattcaaaaaccacccccaccccagaaaaaaagaattcaatcactacactgatatactagttcatcttagcatgctgacagctctgtgtatcatggtagtttgccacatacttttctataaaaaatttcttcatcagtgctgatattttcatattctaattaggtaactccaatgtaatcctttaaataaccccttattataccacacacattaaaaaacccaagtacactgacctgctgcttttgtgcctcattttgggaaacttcaggttcaacaatgtgtttaaatacagtgagaagcttactttttaaaaaatttttttgagattgggtttctctgtgtagctctggatgtcttggaactcactttgtagaccaggctagccttgaaatagaagaagtcagcctctgccttctgagttcnnnnnnnnnnnnnnnnnnnnnnnnnnnnnnnnnnnnnnnnnnnnnnnnnnnnnnnnnnnnnnnnnnnnnnnnnnnnnnnnnnnaacagtgctaataaagttctttcctcaaaatgagccttaactgttgaatgattttttactgggataccagatttctaggaattccattttttacatagaaagttattcatgtgaggctctttgagttaatgcatggtgaaaactcaaccctctaacctgattttttagaaataaatttaaatagtatatatctaagttgaaagactagttcttatctcagaattgtgaatattaaatgaatggggaatgaagcatctgtcacactgccctgtcaccacaagcactactcccctgctttaactgccgtgcaggtttaccttctgatgcatgactattccatctctttagaggctttttcctggtttcaagagtagggagataattaagatagttgaaataccagcatcaatgcattccaactacagtggtttatacctgtagtgttcagctattcttagagcagcctcagctcttaagcttcagctgcatttttgagatgcagacaagttcttggagcataaggcaaaccctggttgggtagaagttatttttttccgttggtcaagtgcctgaaatagctactaaattgtagtaagtttagctgtaatctgctgggatgagtacgtgggacaaagctgactgatactgctctgtgtttttttttttttttttcccaactgagttggaacacaaataccgttgctatctgcctgtatgaaattgtagtctggcataccagcatatttcaagaatctcatttgcttcagatttttttctatcagattatgccataaaatacatatttctcttttgtagctcaaactggaagattataaagatcgcctaaaaaacggagagcagcttaacccagaccagttggtaagtagcttgagattatttgttagatatactggtctgctttcttttctttttttgtttattttttgaggcaacgtttctctgtgtagccctggctgccctgaaactcactgtgtagaccagactggctttgaacttacagagatctgccctgcccgtgcatactattagatgatattggctagatatgggttaaatagaacaagttagattagataaggtaccatgtacattgaacttaattcgtggtaggaagactgagtatactcaagttttcaactcttcactggtttaatataaacttgacatctttctattctaaaatctgtttttgtagctttgtcatgattctgacttgctctcttttaatttcttttatacttgagttatgtacttagccttttaaacattaacttcactataaatattgactataatttttcttattttgaactcatagtggtacttctgcattgccctatgaaattctggcattgcaggccacacaaggcaccatgcccagctacaatttttttttttcatgtttgccctgttcatgatatacctgttaattccaaatattactagtttgtgaaggagaacatttacaatatggactaaaaaattctttatggttatttgatgttttggcctgatcacatttcctgccttttaagaagggacaaagtgtgcctaaagttatttaagatttattttttaaaatgtatgtgtatgcatgtatatctttgtgtgggtatgtgcatgttagttcaagtgcatgtggaggccagaagaggtattggatcccctgaagatgtagttacaggcagttctgaactgctcaatgtgggtgataggaaccaaattcacatccttgggaagagcaagtgctttttaactgccaagcagcccctccagacctgaagttatttgatctggctcatgagcctgttaacatttccctccttgctgtgttgtcatcttctctgacctagaagtcctatggtgtagtaattatgattctattgaggcttagctttgaattatgtgagctctgagcaccctctacatagtgaagggacttggctaatcagccatcatttatttccttggttttgttttcatgctctgtccactaacttaaaatgtggaagcttctctgtaagaatcccagaagttctgttagaatcgtatcattgaggcgcttttgatgtgaacttggttaaagtgcttgctgcataagaatgagatcctgagttcagtcctggagtccatgtaaaaaagttgggtgttgtggggtgtggtgtgatgtggtggtgcactctttttaagatctatttatttatttatttatttatttatttatttatttatttattatgtgtacagcattctgcctgcatgtgtgcctgtaggccagaagagggcaccagatctcattacagatggttgtgagctaccctatggttgctgggaattgaactcaggacctctggaaagctgtcagtgctcttaatctctgagccatctctccagccccacactcttgtaatcataaccctggagtggtggagacagatccttggggcttgctgtctagtcaggctaacctatttggcaagttccaggcgagtgagagaacctatttcaaaaaacaaaataaaaaaagccccaaaaccaaaaaacaaagcaacaaaatgaaaacaaaccaaaaacagtggagaactgtagagattggtgcttaagaactcttattactcttctagagaacctgagttcagttctcaacactcatgtcactcagctcacaactgtctgtaactccagctccagggaatctgatacttttgcatccttggttaccagtatttatatgcacatgccaatacacacacacatatttatcattaaaaataaatgttaggggctggagggatggctcaacagttcagagcacttactgctttactagaagaccaggtttaatcacatggtggctcacaatcatctgtaaccagttccagggtatgtgatgccatcttctggcctcagtggccaccaggtacacaagtgttacacagacatacatataggcaaaacaccaatacacattaaattaaaataaaaaaaaaaatcccccaaaacaccaatgacctaggcttggtggcacatatccttaatcccagtgctgcggagacagaggcaggcagatctccgagttctctgaaagagcacacagggtttataactgccaagctatctcttcagtaccatgaataatctttttatgtatattgacatatacatttatgtagaaatgttttgttttgagtaatgttttctaggagtagaataatacactatctgtatatgtgtgtgtgtattttttaaatatatatttacttactttgtggatgtgtgaaggtcagagaacaacttatagtagtcctttcttttctctgtgtggattctaggaattgaacccaggttgtcagttatggcagcaatcatattcacccaccaagcaatctgttgatactactacactatctgaattattgagactccaatatagttttaactgcttgaataagttccctaacttgttctgtcccaagtggacctttttcttcattttaagttaaaaagggtctgggcatggtgacacaaaccattaatcctagaattcaagaggcagaggcatgtgtagatctctgagtttgaagccaccatggtctaaatagtgagttcctggagtgtcagatctttatagtaaaacaacaacaacaacaacaacaacaacaaaacaaagcagaacaaacaaaaaaagcaaaattacatttatttattggtatgagtgttgtggggaggtcagaggatagtttgtgggagttagttcttttcttccaccgtgtaattcctgtggatcaaagttggtagtcaggttttgcagcaagtgcctttacccactgagccatctcatcatctggctccaaactgacttttgtctttctccacaaaaagttaagacaaactcatctcttctgattaccagttgagtatgaaatcttttatttatttatttttagtcactttatgtgtatgaatacatatgtttgtgtcctgcatatgtttgtgtcctgcatgtgtgtgcttggtgcctgtagaggtagaaggaagtgatggatctcctagaaccggagttacagatggtgtgagtcatgacatggttactgtgaaccaaacccaggtcctttgcaagagcaacaattgccttttaccttaagccatttttccaggccctgtaatatgaaatccttgtttttgttttttgagacagggtttctttgtatagcctttgctgtgctggaactcactctgtagatcaggctgcctcaaactcatagagatctgcctgcttctgcctcctgggtgctgggaataaaggtgtctgccaccacagcctggcatggtatgaaatcttaaaagaagttacttctttaatttcagtaggatagtgcttgttataatacttatgatatctattacaagcaattatttacacattgtttctgccattttttagatgtttcacagttgctcttcttctgtgtgatatttattattcctatagtacgtttgagtggtgaatgatgttgactgaggaatcttaatggcttagtgttctcaaaacccatagagatctctaacttaaatgtttagataggatagaattaggactctgatttttttattttgttacatgtgtgtatgtgtatgtggggggccagatggcaacttgctgaagttggttttctcctaccatgtggatccttgggattgaattaagctcttcaggtttggcagcaagaacttttacccactgaaccatctcaatggcccagggctctgatttctaatataaaaattagaggtttagcttggtagtgtatctaaagatatgcttgagggattgaggcatgggaatcgtaagtttgtgtctagcctagaatacgtacgagttttatgccaacctgagatccagtgagaacctgtctttaaacaaacaaaagtagaggcaggtggatctctgtgagtttgagaccagcctggtctacaagagctagttccaggacagcctccaaagcctcagagaaaccctgtctcaaaaaaaaacccaaaaaataagtaaaaaataaaaaaaataaaataagcaaacaaaagttctagcattaaaatagactttttatattactttaccttgtagataccgtttctttcagtaagtacttttctaacttacaaagtcctatctcctttatcaattaaaaatgatttatgtttatttgtatgtgtctgtttgtgtatgggaatgtatatccaggtgtccagaagagggtgtcacatctgttagtgctggaattatggtgactgcctgatatggttgctgggaactctgatcctctggaagagcagcatgtactcttaacctctaggccatctctctagccctttagccatttagggaacacttatttattctgagcttaccacggatttgctggggtttttttcctgtctggtaggaagctgtggagaagtatgaagaagtactacataatttggaatttgccaaggagcttcagaaaaccttttctacactgagccaagatgtgagtatgttttcattgcttttctttgagccactttagctgctgacgttgaagaatatgccactacctaaaaattgtgtttgcttatcagtcatctgaaaccatgtggatagtatactgaggaagtctcactaagactcctaggaagtccttgaactcaatatgtagcccagacaagcctggaaattgtgattctcctgcctcagccacttgagtgtctgggattataggtgtgcacagttgtgcctggctctagactatttttaattttctgctaaatttatttaggcttggtattcttgactttgaagagatttttgtttgtttttttgagacagggtttctctgtaactttggatcctgtcctggaactcactctgcagattttgaactcacagagatctgcctgtctctgcctcctgagtgctgggactaaaggcgtgtgctatcactgccctgtgtgttctttttcttagggcactcatatatgttcttccaccatggtgctctagagatgtcacctactttggcaagctatgctgtgtagtttgactttccttttgggctgacagcccccaaacaatgacattgagacttaataattatgaaatcttgacctttagcttaggcttgttcccaactagttcttataacttaaattaatcagtttctgtcaaactatgttctatcatgtggctttttacctcttttccattcagtatgtctgactttctcagtttttcactggcatctcctgcacaccaaggttctaaccctctaagttcctttctctgcctggaagtcccaccaacctctcctgtctagctattggctggtcagatttttattaaaccaatcacatcgacacatcttcacacagtgtaaaaaaatatcccacaacaatgctgattccatgaaagcagtttctttttttggtgctttttttttaaaaaaataattttttaatggtcattggtgctttgcttgcatacatatctgtgtgagcacgtcagatgcccctggaactggagttgcagacagttgtgagctgccatgtggatgctgagaattgaaccaggatcctctggaagagcattcaatgctcttaaccgctgagccttctcttcagcccccatgaaagcattttcacttgttgcccatgctttatatcttttcctccctccctccctccttccctacctcacccttgagacaggttctcactatttagcactagctggtctggaactcactctatagaccaggctggcctagaactcagagatctgcctgcctctgctttcccaagtgctaggattaaaggtgttcattaccatgcctgggcactgcttcagatttctttctcctcataatgtgacagtaggtctagagcttgctacaaccccatctcatcccatttgaagtatttttagattaacttactttacatgtgtgttttgattgcatctatgtgtccatgtgcataccttgtgtttgaggaggttgtcagatagttacaaaccaccatatgggtgctggaaactaatagacctagggtcctctacaagaggtctattagctgagccatctctccagccctgagcttgtcttcttgagtcaagccttcaaggtgtttgtcattaccttcctattcctttttctcgtagtttttgggctgctttaaacttttgttgtcacgtcaatagattgtggaacatcttgttcttttatcctcagtctaactacattcttcttagtttcttgagatgatttctgttcttagccaaaatccattatactaagtaatggtttggaaaataaacttttgttcagtattgctgattggattgttcatgtgttttccttttcaaactgatcaacaaagaagaaaaaggtgtaagattttcttagtttctacataggtaaagacaagaaagctgttagtggttttcatgagatctgatcatgagctaggagacagtgtagttagttgacttgatttatttaacaggtatttgagttcttgttacatatcagtctctgtgccaggcagtgatgtatggatgaataaccaaaatatagtctctgtcattatgaatgcagaaaaataaaagtgacaactagggactggaggtgtagttcattaggtaaagcactagcttagcgtctgcatggccctaggtttgattcccagcactgccaaaaagcaataaatagataaatgaattatacacatgactatttgatgtgacaaagactttgctggaggactttcaggttggcataaacccatagaacatctaatctagttttgggaaataggctaaagagaaatatgaagtaatgaagtggtatgtatgtgtttatttctgtgtgttgtgtgtatgtattcatgtgtatatgtgcctgtgtgtggagacccaatattgactttggatttcttctttgattattctctactttattgagatagtgtctcacttgaatccagaggttgcctatcagctagtctagtagccagtttcatgagggatcccatcactgcctcctgagtgcttagtgttacaggcagcaccatgcctgcctggcttttaagtggatcctggggatctgaattctttttttttttttttggtttttccagacaggatttctctgtgtagctttggagcctatcctggcactcactcttgagtccaggctggcctcgaatcacagacatcttcctgcctctgcctcccgagtactgggattaaaggtgtgcgccaccaacgcctggcgggggatctgaattctaatcatcacactttcccttgggcaagccccttaatcactgaaccgtctccccagctctatgatgtgtatgtggttgtgaagacattttggttaattagagtgcaaagctaaccacactagccatagagtccaggcagtggtgacacacacctttattaccagcacttgggagacagaggcagacagatgtctgttagttcaaggccactctgggctacacgagattgaatctgtctaaaagagaaacagagctcacacaaaggtgatcccagcacttcgaatcccccgcctttaatcttagcactaaggagtggagacaggaagtgatacagctgggtggagaggaatataaggtgggagaagacaggagctcaatgcagtctgagtctgaggaacagtgcatctaagcagtctgaggatttgcttctctgatatttagcattaaccccaatatctgacttggcggttttttttttttttttttttttttttttttttttttttttttnnnnnnnnnntctctgtgtagtcctggaactcattttgtagaccagcctggccatgaactcactgagatcctcctgcctctgtctcccaagtgctgggattaaaggtgtgcaccaccaccacctgaccctgactctgagcttttattattaaaacctaagagaacttgtattacagaccacagcaactcttataaaggaaacatttaattgtggtggctcacagtttcagagattcatccattatcatcatgtcagggagtatgacaacatgcaggcagacgtggtgctggagttgacagtccttacattttgactcagaggcaacaagaagttgactgactgtcaccctgagggaggcttgagaaaaagatacctcacagtctgcccaacagtgacacacttcctccaacaaggccacgcttcctaatagtgccactccctttgggggtcattttctttcaaaacacaacacctttttaaaatttctttttgttttgcttcctttctttatacttttcccttattttcctcttccctttcctttgccttgctgtgtagatggcttatttggaactcatcttgcagttggctgtgctcaaatttgggaaatcctaggcatgcattactgtgcctggttagatatatcttttatagactttaagattgtatcaataacccatttattggaaaaaaatcttgagtctttttctttctttgctgttttgttaagaaataaccagtgttatagaaacataatcataaaagctatgtgggaaaactatattttcttagtggaaacaggtacattattatttttaaaaaattaggcttattttgttttatgtatttgagtgctttacttgcatgtatgtatgtgtaccatgtgtgtgcctggtgctcaactagttcacaagagggcatcaaatttcaaactggagtaacaggaagtaatgacccccatgtagagttgggactgaactgagccctctggaagaacaagcgctcttaaccactgaaccatctccccagcccacaattattatttttttttcagatagggttttacttgatagcccaggttttcctgtgttccctatggataccaggctggccttgaactcacaaacatctatcttcctatgcctcctgagttctgggattcaaggcatgtgtcactgtgcctagcaataagctctttatttaaatggtatgtcaccttgtttacataacatgttaagcttcaagataaagnnnnnnnnnnnnnnnnnnnnnnnnnnnnnnnnnnnatctctgagtttgaggccagcctggtctacagagtgagttctaggacagccagggctccacagagaaactctgtctcaaaaaaaggttaaaaaaaggttggtatgttgtgggtgggtgggtggatggggtgagctagagggaatgggtatgactaaggttcatgttatattatacattaatggaattttcaaaaaatagaaattgaagctgagcgttggtggtgcacacctttaatcccagcacttgggaggcagaggcaggcggatctctgtgagtttgaggccagcctggtctacagagcgagtgccaggataggctccaaagctacacagagaaaccctgtctcaaaacccccccccaaaaaaaaaaaaattgaaaacaagaaccctcattcctcattcaattaaaaactttaatgatggaagtgggggacacattttctgtgggtatttttaagaaaaggttgagttttttgttccagatccctgtggttagaaatgtttggtttttggaataattaattatacacataaaagggactatcttagggatgagacttaattctagatatgaaattcacttacatttaacatagcctaagggtaattttatatactacttttagtatgcttctatatttaattttatatttattttgcatgtgtatgttgtgtggtggtggtgtgtaaatgccacagcacacatgtgaagatcagagggccacttgtgcttctattatatggagtctaagattgaactcaggtagtggggcttggaagcaactgcctttaacctctgagccatctccttaactcagtgttactgcatgggtatcaagattcactggactcagtacaggttaagtgaagtttattcagagagattgtgcttacacaagaggctggtgaccatctcgggttccagctccaaggatcctcccaggctgttccctgtgactcaatcggaagtaagagagatctgggtgatctccagggccccagatctagtcagtcctctccaccatcttgtcctcacctgtgaccacacccatttggctataggtgtgggctgggtggatatctcactacacagtgtgcctacatttttgactgtgacccatcacatggagttagatgtggaattttctttacatttgtattttcacattggtactcaatttaagattttgactttttttttttgaatttttttcctttcttccttccttccttccttcctttctttctttctttctttttttttttcttttttttttggttatttgtagagcaggctggtctcaaactcacagtgatctgactatgcctcccaagtgcggcaaaagttgtgcaccaccacccccagcctctgttcagtttttcagttgcaaagtgtatcatctaggctgggtgttggttttgtgcgccttaaatcccagcacttgggaggcagaggcagggggatctttgtgagttggaggccagcctggtctacagagccagtgccaggacaggctccaaagccacagagaaaccttgtctcgaaaaaccaagaaaaaaaacttaccatctaatcccagctaacatgggtaattgagatatgtgaacctgcatttgttttaacagctactgaaagctcagaaaaaggcccagagaagggagcacatgctaaaacttgaggctgagaagaaaaaacttcgaactatacttcaagttcagtatgtattacagaatttgacacaagaacatgtacaaaaagacttaaaagggggcttgaatggtgcaatgtatttgccttccaaagaacttgactacctcattaaattctcaaaactgacctgccctgaaagaaatgaaaagctgaggtaagtcagtgaagtgattttcctgatatagaacttgtcgcacttttagcttttctgttataggtagttagggattaactaagaaaaatcttaattttattcaatatgggaaacttagatatgtttgatagatcattcaggaattcagaaaagtttgaatgttttcattaaccctgtctgtagtatagcgctgattttgaaaataatgtttggtcaggtgtggtgagaccgtctctcaagcaaaacaaaacagcttgatcattgtcttcaccctatgcagatattcactgtgatactagttataaatgaactgatgatttaaaactgtaaaattgaggctacctaatatttccttccccagttagctactattttttgtattggatatatcagctaacagacagatgtttatgctttttctttgttaaacatggattggtccagctctttgttagctgtgaaagcagagcttagaagagttcagctgttactaaagatcagcttggtgtagggaagaagctccatacaactcagcttactctggaagctgcatgccttactccttgctggtgttctgttcattgtctctatctgttgtttgttggttgctgccttcccactggagttggttcagggaatggggctttctcatgttgaaaagtaagccactctcaggctggagagatggctcaggggttaagagcactgcccgttcttccagaggtcctgagttcaattcccagcaaccacatggtggctcccaaccatctgtaatttagtctggtgccctcttctggactgcaggtatacatgcaggcagagcactgtatatataataaataagtaaatctttttttttttttaaagaaaaagtaagccactctctacaaagtaaagtcaaatggagctttgagtgtttccatttcacttttattcctgaggcacatttgataactaatgatactgcactggcagcttgaattcttggtctatcccttggtagttgcattggtaaaatcttttttattcattttaaggaagacatttagttttgataagtatgtagaaaattcagtattttgcttccaaataataaaagggtaaaattagcatatttacatatcttgactgttgatgggttatattttatatgtacattgtactgctcttcatgtgtatgcgtatgtctaaagccactctgttctgctgctgcttttccttgtcagtgttgaagaccagatggagcagtcatccttgtacttttggaaccttttggaaggtagtgagaaagcagtggtaggaacgacatgtgagttttccctactctggacttaggtagtaaatagtaaactttttgcctaaaggtttagtatgatattgagggtctaaactgtattggtccaccagaattgatatgtctgacaatggtgtattcattggaagaatggtccctttatttatgttaaaaggagctatcgtatattcctatttactgaaagggaactaacagatttcaagtgacaaccaatatgatttggaaacaaaagctaagtactagttctggtttaatactagcttaatcattttggagttcagtttcctattctgaatagtggtacatgttctagttgagaactttaaatccctaccttgttaatataaggcttatttagtaggtcattctaagaaatgacaaatggtttgcctagtctgttggacggtcagatgaccacattcaaattgccagacatgaaatataaagtacacagcttaggatcttgaaaactccctataaagtaataaatattttcataatagttaatttcttcctctttagaaaatatctgctgggtgttggtggtgcacacctttaatcccagcacttgggaggcagaggcagcagatctctttgagtttgaggccatcctggtgtacagagcgagtgtcaggataggctccaaagctacacagagaaaccctatcttgaaaaaaacaaaaacaaaaaagaaaaacgtaaagaaaatatccaagtctagggcctggggtatggcttagtaaagtgctatgtaatcatgaaacctgagttttatccccttacctgtgttaaaaaaaaacaaaacaacaacaacaacaacaaacatttcagcatgcaatggctgaaatcccatcactgaggagatgaagaaaggagaatccctggggcttgttgctggctagtctagctgaatcagcaaactccagattgaaggagggagggagggaagaagagagagagggagagagagagagagagagagagagagagagagagagagagagagaaagaaaatgcttgaagaagactcctaatactgaccaatagcctccctaggcatgtgcacgtgcaaccacacacaagtacatataccttcagaaaagtaagcccatttatgtgtaactatcaaggtttataactctgtttaagacttaaattataagtgaaaatttatatttttgatccaggcatggtagaatgtactctggtcccagttagtcagaaggtagtttgagcacaagaattcaaggccagcctgaacatcgtggcaaaccctgtcttgaagaaaacaaaaaagacaaaggaaaaaatggtttggaaaagagtttggcacttcctcttttattttatatacttactatactatatatactaagtatactatatatacttaccatatagccaaatagttacatgtccagaaccgaacagaaatgaaaacaagttctcacttaagtacaatgcttatactctgttcatagtagttctctgttagagtcagtgtaaatgcacagcagtaaattgatatacaaaataggatattttcattgagtagatttttagcaattaagtaacctctgggtctggtgtctcatgcctgtaatttttttcttaggagacacacacaggaggatcattaccagtttgaggtcggactgatctacacagttctaagccagctagagctacatagtgagagcttattacagaacaaacaaaaaccaaaatcccaaaacaaacagcaaaaacaacaaaaaacattaatacatgcaagagcatagatgaatctcaaagtaattatacttagtaaaagaagccagacaagacatgaatatatatattgtatgacttcatttatatagaattctagaaaaggtcactaagttgctagggaaggggaccaattcagaaggtccttgagggatttggtggatgctaaaaatgctttaaaattgtggttctgttggtggtagcgtgtttttgtagctgttaaagctatgaatgtgaagtaggtgaaaaattttgtttataagtaataactcaaagatgactaaaatatagctgtggtggtacatacctgtagtcctagaattcaggaggctgaggcaggagaattgctatgagtttgaggctagcttgggctacaaagtaagatgtttaaaacaaaacaaaacaaaaaaccaaggctgattaaaaagagaatcaggccaggtgatggtgaagcatacatttaatctcagccctcaggagggctcagatctctgagtttgtggccaacctggtctacagagtaagttccaggacagccaggaccacagagaaaccctgtctagaaaaacaaaaacaaaaacaaaaaaacaaaaaagagagaacaaatcaatgttataatacgcaatgaataataggcacatactatggatgttctgcctggtttggaattgggttttattggacatgtaaaataaaatatatgcaactttgacattacttttataattaaaaaaaactttctagtgctagtttgttagaagtgacatgagtgaaatcttactgaaggagttttacaatttaaaaatattaagccagttcttgtggctcaagcctgtaatcccagcccctaggagatgtgggatggctaaggcaggagaataaccagtttttagactgcctgggctaatagttattgagacttggtttccacatagccaaccaaaaagaacaaggacaacaaaaccaggagtgtctgagataagatttcctattggatatgatggatgaattaccttttatttctatatatccttaactaataggtcaacatagagcagtggctagttgaatatcttggaagcatatggaaaaaatgtctcagctcagggaatttgtgccttgtcatactctttgattaggttctttctttgatttttagtcatttttcaaatggtaaaaatagagaacccgagaaactcaagtaatttgttaaatatatagtctcatgtttactgtttgtatttgctcaacatgaagtgtaaagataaatcactcttttattttcctggcacagacaattccaagtgtcctcctgcccccatccactcttgtgatggttaactataagcaggataacattgagattcttattctccataattgtcaatgaactcttaggttgtatgctaagtcttcatcactctttcttagacaaacatgtgaaagatctgctgtctaagctgctcaactcaggttattttgaaaatgtctcagttctcaaaaattctaaggaaaaagaggaagaaatgctaatgcaatcaggaaagaagaaacaattactgaagactgaatctatcaaagagtcaggtttgttgcgatctttgaaggttttttgttttgttttgttttgttttgttttgttttgtttgagacagggtttctctgtgtagctttggagcctgtcctggatctcattctattggccaggttgaccttgaactcacagagatccgcctgcttctgcctccctagtgctgggattaaaggcatgcaccaccagcgcctggccatctttgaagttctttagtttgctatttttttaactttatttttaatatttattttatttatttattttgaggcagggcataaactatgtagccgggttggctggacttactatgtgtagtaggctggtcttgaacttggatgattgtccttcttctgccttctgagtgctgaaattaataggtttgtactaggactcctgttttgttttgtttttaaaaatttgcttagcatacaaagaaatgggttatactatgacattttcattttcaaacatacaatgcttttgttcctaataattcttgcatgttgatgaaagtcccaccttgcccactttagcccaaaataaatgcacagagacaatatattaattataaactgttgcctggtggcttcttattggctagctgtgtcttaattattaacccatttctattaatctgtgtatttccacatggtcttggcttacaggagagcacctggcacagcctcttttcctgggctctacagtcttcctatgtttcccagaattctccttgtctcctagtcccgcctatcttcctgccttattgccaacactgttttattcatcaaccaataagagaaacatatatacagaaggatttccccatcacttgcattctctgatggtagtgcccttatcctttcatgacatgtattccattatagaggttgcgttcttaatgcattttagaaccatcattttgaaatgatttagtttgttggattctatatgaatggagatttttatttgttgtaatttaagcctaggtttagaaaacagattactagggattggagggattgctcagtggttgagtatgtactgctcctacagaagattcaagtttgattaccagcagcccaattggagagcttacaacttttttggcctctttgggaattgcattttgtgtatagacccacccttagacacaagtatacacaaaaattaaaaaaaaaatgttaaaaaagagagaaaacagtgttgtgacttacagtttagcttttttttttttttttaaaaagattttattatgtatacagcattctgcttccatgtatatctgcacaccagaagagggcaccatgtggttgctgggaattgaattcaggacccctggaagaacagccagtattcttaacctctgagccatgtctccagccccagtttagcttctttttgtttggttgagacaagattttctgtagtaagggctggcctgggttcttgttctatgtcttccaagtgctgagattaaaggcttgtgccactaaactgagttcaagattgaaccttaatagaaacattagtttacattttgttttgagagaaaatatttggttaaaactaggcatttgtgaaacctgaataaacctctttgctaaactataataggataattccatttatagtatagcttaaatttaagccatagtggaaaacagtattttgtagaaaaatgtgagtttgggatcagttattgatgtaagggaaaagaaaaaaaaaatagaaaatgagggattggggatttagctcagtagtagagctgggctggtgttgagggactttaatccaagcactttgtaggcagatgcaggctcatctctgagatcgaggccaccctggtccacaaaacaaatttcaggacagccagggctatacagagaaactgtgtctcaaaacaaacaaacaagggggaaggggagggagagggagaagggattggcacctgaagcaagcttgttcctaatttgaactaataaaataaaataaaaaaacaagaagaaaatgaaatatatttttgattagccatttatttccttctttccctttttaaaattaaaaaaatgtttttatttgtcagggtctcatgtagcccacgctggccttaaatttactatgtaatttaggatgaccttgaacctttgatcctcatgcctctacctctccagttctaagattaaaagtttgtactcctctgactagtttatgttgtattcagaatcgtatctaggaactatgctaggcaaagacaaccagctaagctacatccctggtcttacttcaccttaatactaagttcagtgcttctgtgtctccctctcttacctctcctgaccatagtatggtttggcagaggctctgtttcaagttgagtttactgatttgtccttgtaaactttaactgtaattgcagttttaataaggctatttgtaggtattttacttaggaataaaatcttaaaaccaggttgtgttggtacacacctttaattctagcactcaggaggcaggggcaggcagatctcttgagagtttgaggccagcctggactacaaagtaatttcctggacagccagggttatacagagaaaccctgcctcaaataaaccaaaaagaaacttcagtaaatatctcatgaaataccagcttcaatgacaattttccttaggacccattctctttttgtcctttcctttttgtgctggggatcaaacctcaggccctgtgcatgctgtgcaagtgcgttctaccactgagctacaaaccctaggccttccacgtgctcctgaccaataaacaatagctggagtagtcctgctatgaatatatttaattgcattaattattctgagccctttgacattctttactggaatgaattatggctatagccagactaaaaacctagaatttgtacttatttataattcttttatcttctcagaatctcctgtggaactcgtgcagcctgagatacaaccacaggaggtgagaatgtgatcaatcaggtcctttgctgaagttgttttaagttttcatttgttactgtggattagagtctgaggcttgggcagacaaactgaacttgaatgctgccttgcaacttattggtttagtgtctggctggattgttgttctcatctaggtagtgaagcctgggatcatatctggtgtgactgagggccaaatgggctagtctgatgcatagtaacttctttagaattacttattgctgttttaaacccttatgtttgactttaaggatgtatagaattttgttaccaggtttacaatggtagcagaagagagtgtttactctttttaagtgacattgaaatttgtggaagctgaaaagaatcggagaaacagatgcacaatacaatagatatgtggaggaaattgagaaaaacctgggaaccgaggagacatacagctaaacaatataactttctgtaattgaactatcctagcagtgacttttaaaggagggtgacaggtgtgtggaaagaccctcagtctggcaaagacaaaattgctttggcaaagggactatttaaagtgattgtagtgccataatatgtagtttcttctaatcttatatgggtcacagatttctacctttgaagtgtcaaagtttacatttctgttaattgaggagaaagagtagatacagaagtcatccagtttcttcaaataggataaggataagagtttcattcagagctgggtgttggtggtgcacgcctttaatcccagcacttgggaggcaaaggcaggtggatttctgtgagttcaaggccagcctggtctacagatccagtgccaggataggcttcgaagctacacagagaaactctgtcttggtggggaggctttcatgtcaggtagtttcttgtgagattgacagaaataggaatactaatagagttgaacattccattgaaagtctatgcattttaagcttgaagcacattgtttatttctctggcttagtttcttaacagacgctatatgacagaagtaaattattcaagaaaacaagaaagtgaggaacgatcttgggaagcagattatgtgagaaaaccaaatctcctcaaatgctggaatatgcttcctgaaccagatggtcaacagaagaagcagaagtcctccaagtcttgggagtcttctgtcaggtcccaggaggtaccaaagcctgtggtttccttagatcaggggaatcctaggtcaacattgtaggaaaagcagaggcagcagagttctatgacacctgtcagccaatggaagccacaaacccctaagtccaaagtgggcagccctcaagaagagctgagcatacaggagacaccaaagccatgggtagttaagccacagaaagaacaagatccacagaagctacctcctggatcctggacagtctctgtgcaaggtgaacagagggacaggagctcctggaccactcctatgtgcagagaacaggattcaatgaagcctgggactccagtgtcctgggaaaacaatgctgagaaccagaaacactccttagcaccacgtcacagattttttttaaagtcctggggagcagcttcagcaggcctgttaccaaatgaccagctcctgcccaggaagttaaatgtagattccaaagatgtgagtagatttctaagtctgcctcatcctgttgctgataaataaatctttctctcaggatgtgaggtttgtaaggaatgatccttggataatctcggctagtattgcttgttcttaaattataaattacttcatattgcttatgaaagcaaacatgtcaccactttgtttgctaacgagttaacttccaaggctctccaccccaactaagtagttgtcctttaaccacctgcttttttagccaggagctttctgatcaaatctttggagaggtcaaaacattgcattttataaataaacaaactacctctcaatgctgccttccagaaagagaattttagagttattcatcttttttttttttcttttctttcttgcaacagggtttctctgtgtaacagccttggctgttctggaacttgctttgtagacctggctggcctggaacttacagagatccacctgcctccagagcactgggatcaaaggtgtgcaccaccacacctgaattatttttgagacaagatcttattatgcagctctggtgggcttggaactcattatgtagactagtctggctttaaaacttttagaagtccacctgcttctgcctcctaagtgctggcattggaggcacgggcctggctttttcctttttcttttccttgtttttctctcttcacgagctaatattttttttttctcttcttttctcttcaagtgctgatatttttatcttattcctgcccttgtagaagattgacagctgcacttcattaatttacaacatctagtagtaattgtatggttgctgtttttgatatgcatattaaaccccattttaatatcccaataaagcagtaagagacaacagaactttaatttgagaatttgaggccaacctgatctacacatagtaagttccatgccagttagtgctacatagagagcctgtcttaaaacaaacaaacagaaaaccaaaaaaacccacaaattccccgtagggtccgaatcactaggtatttgaacctttaccatactagaatattgatcttatgctatttgttgaatgatattgaaaaacagggatgtttagttacaaaggtccaaacattgaatttgcttttatgggcaccattatgttgaagttttaggctctttcagtaagtaagagggcacttacatctctatgaatagctgatctcagctataaaaatatggcttaaggcaggagagatggttcagtggttaagagcactcactggctgttcttttcagaggagactgtggtttgattcctagctcccttatggcaattataacacctgtaattccagttctgcctatctgaatccttctagctctgcaggtaccaagcacatacatggtattcacgcaggcacgcactcgaacagagataaaacaaccatacacataaagattaaaaagaagaagaaaagaagcaagaactgtaaatgttagagcaaattcaagatgtctaccaattaatttatcatgagagcttctaaacagcagcagcttccaagagtatacttttaaattaaatataattgtgtgtatattgcatatggatatatattatttataaatattttaatgactctgaaatcacatgtatctttaaaatgggatgcatatttaatgtagtgatagtaatttttgccttgaatagaaacactgctatgtgtcatagtcagtggcttcttgtcacagagaacaaatagtagtaactgtataatggaacacttttatttttattgttattattttttccagtttttcgagacagggtttctctgtgaaatagtcctggctgtcctggcactcactctgtagaccaagcttgcttccaactcgagatccttctgcctctgactcccaagtgcctggaattaaaggcatgggccaccactgcctggcaatgaatcacttttaaagaatggttcttaattctgggtccttttagaaagaaatgcttcatatttttaaaagattttctttaaagttgttttgaaaggggaaagccaattaattggaaaatggatttatgtaaaaatcttactgtgataagtctaaaaaatagtatttccattgatttctgaggatgtaatcgtaatgtaagctgtgtgactgagactcacttacacatggcgggtttgtcttgtaggtgtgtgtatccatgcttcagcctatggactcttcctccccctttccaaaggatcctctattgaggaaagaaaaactgcaggacctcatgacccagattcaaggaacttgtaactttatgcaagtatgagctgttttgttttattttgatcttaggatattttttattctttgacaacttcttacatgtatagtgtatcttgatcatgtccagttcaaattcccccttcccattgtcttttatagcccccaatacttcccagttccaccttcatattctcatgaatatgagaatatgaaacaaaccacagcatttcgttagtgctgccagtatgtgtatgagtgtgggaccatttacccatttatcagagaaaaagcaatctagcagccacaagaaaaatgatgagctcccatcacctccagcagctatcaattgttgttagctcttcagctagatgtaagcctcataaatcccttatctcatcctccctgggatattgactagcttggatttctgtaggtcgccatagcttccatgagttcaggaacacaagagctttggcatgtccagaagagtgtttcacggtactcctcccaatcttctgtgcttgcctgtgggataatccttgagctttgaaggagttgatgcgtgtgtcccacttagagctgagtgagcatttaacagtcattctaaacactttggccagttatgagtctctgcactgacttatgcccatggcaaaaggcttctctctgaccaaggtttaaaatagtactaagctgggcagtggtggtacacacctgtaatctcagcacttgataggtggatctcagtgagtttgaggccagtctgatctgcagactgagttccaggacagccagagctgttacacagagaagtctcaaaaacaaaacaaaaaaagcataatgtatttaggagtcagggctgctgtgggccattggtaattaccctaagactgacagtctgtttgctacttggtctttcaggtcccactaaaaaattatgagacactcatcatctgccttcaaagctgtagaagattggaaacttgtgttaaatcaatagttaaatgataaattgtgtaaaagacttttttcactttaaaatagggtctgactgtgtagtcttgctagcctggtactcacagtgtagatcagactggcattgaattcatagagatcagcttgcttctgcctcccaggtgctgggattaaaggcctatgccaccaatccatcatgaaagactatgtttaattaaatagtgtgacatagactcttagagaatatcagagcagcagtatattattgaggcctgactactcaagtaaacaaagtaaatgtaaataaaggatctttgagctttggatttaaacacctgggtgtaaacaccaatcctatttcttgcctcataactccagtcagtttctttaatttccagccctagtctgcaaagtgagagataatttgaagataaatgaaagagctaggatgcttcccacaaattttctagctctgggaggttttcttgagagaaccctgatacacagatatgagaagagaatgtttatcagtatgaaccagtaggtgattgagataaaaataaataggccttctcattagttaggtataataaaatccaatttcaaacagactaaggccaacattttatgcttaagactcatatcaggagtgcatgtctaagttgggctttagaatcatgttctagtttaatacttgacccaatgttgaggtttgacagtaaccttggggtttagttttgactctttaatttcttgtttaagaataatttgttaacatcacaaggaagagccaggaaatggtggcacatacttctaatccccaaactctggaggcagatgcaggtggatctctgtgagtttgagtccaacatggtctacagagagagttccaggacagctagggctgttacacagagaaaccctgtctcaaaaaaccaaaacaaacaaaaaaccaaaaccacaaggtaggaattagctagatgtctgcacctttagtaaaagttgtgatcaatacagttagctacttaatcactttaaatgaatcatctgtgtttcttctcactatttaaaatcttatctttaggaatctgttctagattttgacaaaccctcaagtgcaattccatcgtcacagtcgccttcagcttctccaggtaacccagtaggagaataataattctaaagacttaaaacacacagctttatagttaacaactatttcttttacgaatcattcactccatatagcttaagtgtttattaatttattctaattatatccatcagtcagtagagttgcatagggacaaattatcattaggacataagtatactttggtaacatgtttatatttgttagagaaaaatcctcagatgggcaagtagaaatgcttaatagctgctttatcaattttccatgttctttctggagtgatttctgactagaacctgcttgacctttgaactgtaaatctagtgtggaggcttttgagtactgatatttagaacagtgaataccatggtaactgatgatggaaccttaatctaaaactggtgtgatgcctcaaagctgaggcctctggctccctgctaatttctctcaggtaaggaatgacatgatcaagctatagtccaaccgtgataagcattgaacacctgctaaagacttatgctgtagtgctgggcgaagcaaacgagtagtgactggttaatgagagaaaccaaactaaaagctatgtaattgtagaaagtatattattatgtgtaaccacaggggaaaaaatctaaacaaacagatgaccagctaagacttactattaagattatgtgtatcagttagtgacaactcatatggcttagtctttgtcttccagattattatccccagtaatttttttaaagtcatagttcttttattttggaagctttaatgcttttgcccatataaccttaaaacatcagcatgggggctgaagaggtggctcagtggttaagaacatgtattgtccttgcagaagaccagagttcaattcccagcacccacatcaggcagcttacaactgctagtaactccagctccaggggatggtcctaacatcaggtacatgtccatatacagacatacacacatgtgtgtgtaaataaataataataaaaatgttaaagacaaaaacaagaacaaaaaactgcgttaccatataccacagatggaattagtgtttctaactagtatccaatctactctcttcaaggttgcagtaggaacctgttcttccagctgatactttgtgaagagtaaactttgtcttgtcaagttgacatgcattactccccttaattgtttgatttattttagtttctacagtatctgcagaacaaaacttgcccaatcaaaatgattttcttcaagagccattacaagtaacttctagattaatttgtcttatactcttctttgcttcaagggggaagacttcttactttgtcaagaataatcataaagttttttcgtgcgtgcgtgcgtgctactattattggagacaaagtctcttaatatagcccaggctggccttgaactcactctgtagcatatactggtttagaacttgtgatcctcttgccttaggagtgctggaatgttgtcctgtgctagcattcttgtagcatttatgcttttaataacctctctatgtgagtctgcatacctacacttagaacccctagtctcaaacaccatgtttactcaccagtatgtaaagttacttctggctactcaaagtgataatttagaggcaagagtgattgcaccttataaatgaatactaatagtaaagattttgttgttaagtaaaacttcatttgcccagtgtggtgctagacattgaatgaatctagctaggcaaatgctctgccactgagctacatctgcaaccccatcaaatgaagctttaaataaaatttgacattttgtttgttattttgagccagggtttgctttgtagtctagtgtggtcttgtgatcttcctgtttcattcttctaaccctgggtaataggtgcattccatggtactgggtttcaacgtatgtttagtttaactattgaatggacaaaggaagattagtttagtatctgggtttttttcccccttgtacataagtatagctcaacagaagccagtctcatttatgatgggttgacttattattttaattcaaagtactgaaaaaagcatagtttcagaacaagctcataaacctaatatttttgttagatctaaataatgtgtgtttagtatataaaatgttctaaagtattacaaaaaattttccctaaactctctttggaggtggtggtggaagacaggatctgtctgtgtagccctggttggcctatcaaactctttctctttctgatgtgaaagtgaaagtgtgtgtgtgtgtgtgtgtgtgtgtgtgtgtgtctgtctgtctgtctgtctgtctgtatgcatgtgcacatacctgtgtctgttttttttttttgtttttttttgaaacaaagtcttatgcaacagtattcaggtggacttggagttcactatgtagttgaagaggatgaccttgaactcttgatcctcctgactctaccacctagtgcttggagcaggttatagaaacataactactctgatgttcagttaacatgcattgatttctgtgatgcacctgtgatgttatgcacctatgatgttactggagcttctaagaaccacgaggaagtattgggatgcagcattggatgcgcaagcacttagctaccactcctgctagattgtttttcgtaggcttctcttggattctaatacctttttgtatcataggtttcctaccaaactgctcttggtgttttattgttaagttgtcacggccttcattccttttgtgcttgtttctagtttttattatttatttattgggttttttgagacagggtttctctgtggctatcctggaactagctcttgtagaccaggctagtcttgaactcacagagagctacctgcctctagctcccgagttgggattgaaggcgtgcgccaccactgcctggcttctagtttttattttatacctgcttctaactcataattttcctagaactttgatactgctttgatcttcgtggagcttgtccatcgttttttatacttctgcctgcctctgtagggcatgaaaagtctttagactggaagcatgattagccctgtacctagcttgtcagcatgcactgtgaagtgtcagccacattgcagatctgacaccagattttcatggtcagcaaggctgtagtgtaactgggacacagtcctggaaaggcagtgtgtaaatctaagtgttctgctattgaactttattctaattttgggcagattagtttacttttctttgttgcctttcttttggttgttgttgttttcaaaatagggtttctttgtgtagctctggctgacctggaactcattctgtagaccaggctggcctctaactaagattcagagatcagtctgctgcctcctgagtgctgggattataggcatgcatcaccactgcccaactatttgcttcttgatgccactaaaataaggataatagtgcttactacacggatttgctagaattaagtgaattaataaatgtaatgcacttaacatactgcctggtaccactgagtgctagtaaaagtgacatatcagggagtccagcacccaggaaatttgaagtgaacacagaatgtgttgacaatgctttctgtctttctgtgtctaggtgacatcctcagttacttgtagctcaaatgcttgcttggttactactgatcaggcttcttcggaaactgaaacagaacttatgacctcagagacctctgaggtaatgagaccttaattactttgctgtctcaaagaatggcagaatgagcttatgaattactggcatgattggaattatgatgtttgtatttgttaatgcattattttctgtagatgtgtgatcccagaacatacacaggtcactattttagctttgccatgtatgtagatttaatagtgcttatcttacctgatgtagtaaatgtatttttagaattatcatttttaagttttttaaagatttattaattttttatgcatgtatatatgtgcaccacatggtgcttggtacccgaagaaggcggaaaaggacattagatccctgtaactggagttaaagatggttgtgaactactgtgtaggtgctaggaattgaaccaaggttctctgcaagaacaacagtgtctcttaactgataagccctctctccagcctccctattactttttttttttttttttttttttttttttttttttttttttttnnnnnnnnnnnnnnnnnnnnnnnnnnnnnnnnnnnnnnnnnnnnnnnnnnnnnnnnnnnnnnnnnccccctgcctctgcctcccaagggctgggattaaaggcatgcaccaccaatgcccagcctattacttttttttttttaattttatttattactttttttaaaaaattttatttatttattatgtatacagtgttctgcctgcatatgtgcaggcaggccagaagagggcaccagatttcataacggatggttatgagccaccctgtggttgctgggaattgaactcaggtcctctggaagagcagtcactgctcttaacctctgaaccatctctccagccccctattttttgttttgatctcctgtagctcaggctgatcttgaattcctgatccatttcaagtgttgggattacaggaaagtatcactcagcttagttactactttattaattaattttaataagtagcatccagggctgcagagatggttggtttagtgattaagaacatgtactgagggacgggctggagagatggctcagcggttaagaacactggctgcccttccacaggacccaggttcaattcttgtacccacatggcagctcacagctgtctgtagctctagttccagggtatctgacaccttcaccccaatgcacataaaataaagttaaattattaaaaaaaaaaaaagaacatgtactgattttggaaagaatctgcatcttgattccctgcactcacatcaggaagctcactactacccgtgactgtagccacagagaatctgaggcatttggcttccatggacacttatactcacatgcacaaaaatagatatattcacacacatacatacttaaaaacaaagtagatctttaaaataacaaagaattaagtttcttattgaaattttaatttaaaaaagagaaaagcaaaaacagagagagagagagagagagaaagagaagctttaggtaggattaggattagggaaaatatattcatttaactgaagatttgtttttttatagtgttattagcactgagttggaatgagttacagtctctctgactcatcttatcaaaagcattttaacaagccagaagtggtgacaacccccgcccccatttaatcccagcactcaggaggcagttgggtctctgagtttgagaccagcctggtctaggaagggagttgaaggctgtcaagggttacagagagaaactccaagaacaaacaaacaaaaaatgcagaatcttgacagtatgaggtttgtgtgtgtagttctaaatttcagctttgctgtttgagcaaatccttgagctagatagacacagatgggataaattttggggaaattcagtaactgttaggttagagttttgaggtgaactaataaaggagaattcattatagactataagaaagcatagatagttagttgttatagtactcatttggtctaaattaagatagataacttctttatgacacgaaaaaaagtgacttttactaagtgacctgtagtgatctcctttataatcttgtagggattgggttttatgtcatactaatttggctttataggtaaagattacttaaattatatgagttgtgttttttttttttgtttttttttttgttttttttggcagaggacttaggaattcattaatcttttaaatagagaactaacactaaggaactccccaagtttttcttaaactcagtctttgcttatattcagagtaatattagattattagttggaaaatagcaattcagagcttgtagggagcttggtggtggaggaagttgtgagccccttgtgtgatacacactttgtcagcaccctatcaaaaagcaaatgctagtgtgcatcctcagcagacgagatttaaaaattgtaagcaaacgctgctctctgcattcctgtgttcccatgtcatcctaaagaacttgctgacttgtgccagcttggggcttagtgtaaattaacctcctgtcatatgtatggcaagtgtggctgatgctgcatttctcctccacagatggccgtttccacaagtaagccagcatctgcacttacttctccaaatccccccttgtcaaagggcttccagttacctcctgcaagtggaatctcagcatccattagcacagcaccctttcaagccttgcagacagtgagtatgtaagggctactgaatagccgtggtctctcccacactcatctttggcattggatgaaaattttgccttcatgttgctcttatttgggttgctggtgtttacatttgtccactggaaaaaatgatgttgtgacagagtattatatctacaacctccagaattttcaagaagtatttttttttcttttattgaaaatagacgggctggagaggtggttcagtggttaagagtattcactgctcttccaaaggtcctgagttcacttccagcatccacatggcagctcacaactgtctgacgccttcttctggtatgcagatgtacatgttagacaaagtatctatatacatcaaataaataataaaataaagaaaataggcttttttcatacaatatattttgattatagtttccctttcttttcttttccctgttcctctccagctcccctcctatccatatcccctcctatctttagaaaacaaacttgcatctaagaaataataataaagtaaaattaaataccataaaaaatcagaatatgaaaaaaatcaaacaagaaaaagaaccaaagaaaaagcacaagaatcacatatatatagatgcagcaacacacatgtttgaacacacaggaatcccataaaatccccaaaactggaagccatagtatatgttcaaaggacctgtaaggtagaaaaaaggttttaacatgagacagagaacctccaaggatgctgttgagtttgttttatgttggccatctactgctgggcatggggcctacccttaagatttgttcaaggagattttttttatcagagccttgtttcctctctgaaaattaatagacaaagcttaggacccatgtaagaatgtgtgtggttgatcccctgtactccctcctcacaaaaggaatatgtgggtggtaaacattgttttgataacagctaatgttaatcgtcaccagttctgtattactgagggtcctagcatcagtaacctgaaacaaaaggatacatatatatgttagttctcttattcctgaaacattcttttaattttattttagtctcattttgttttatagaagttttggtttgttcaggtgtgagtgtgtgtgtgtgtgtgtgtgtgtgtgttggtgtgttnnnnnnnnnnnnnnnnnnnnnnnnnnnnnnnnnnnnnnnnnnnnnnnnnnnnnnnnnnnnnnnnnnnnnnnnnnnnnnnnnnnnnnnnnnnnnnnnnnnnnnnnnnnnnnnnnnnnnnnnnnnnnnnnnnnnnnnnnnnnnnnnnnnnnnnnnnnnnnnnnnnnnnnctagatttgtataatttttcagggggagaaaacctttcaatatagcagtacatgcctttcctgttggtgtttcatctgggaccttggggatagtggtagtgggtgagcagtatagagcaggcccagaccagggctgctgaactcagtagcatgtatttatggaccctcctattccggctgcacagtttgagggtctttttcttgcttttcttctttccttggcagcctcataatattgtcgcacaaatttagtttttcttttcccaattaaaagcagacagtggttcatcacatgatgaaatagaatcctttacctgaactgttgaagtcctgcctaacctgtcagactactctactgggcttgtcttgtgttgttttgtcagagtccctctttgttgatggttttcttcatctgttctgcctctttgaagcctgcctagttcaagcaggttctcattcattttatttagcaggaggtaaggccctatctatttttaaagatttatttttgctatttttaattatgtgtatgtgtctgtgtatgggtatgtacataggagtgcaggtgccttcagaggccacaggcattagatcatcctgtactgtagccttctctacaagagcagtagcatctcctaaaagctgagtcttctctcaagctcttttaaaagcacatatcaggttttttgttttttgttttgttttagagacaggtctcactctgtgatctggatgttctggaactcactatgtagactaggctgaccttgaactcacagagattcagctagcactgttttttgtttttttttgtttttttattagttcaaattaggaacaagcttgcttcacatgtcaatcccttctccctctccctccccgtaggcactgttttttgtttgttttgagacgggtttttatttttgttttggagataagttctcactatgtaatgctagctagcctggaacttgctatgtagaccagactgtccttgaattcaaaactatatgcctgcctctgcctcttaaatgctgtgattgaaggtatactctatcatgctagctcaggaattctttttattcaccagaggtacagaaatgaagaacaaaacaaaccactaaagctattctggaagctggtcttttaccatggaagggagagaattagagagatgagagacagttactcaatactcaagtgtactgcacacaaaaatcgtcagagtagggaaggcaaagggagacacgtgttagctcatgacttgtgcttaggtgtctggaagactcctgcatggtggaaatttaacaactgctttcttcttgctggagattgaaccaagggtcttgcatatacactaggcaggagttctgcctttgaagtttttaaagtcttttaaaaatttattcttgggctggagagatggctcagaggttaagagcactaattgctcttccccgaggtcctgagttcaattcccagcaaccacatggtggctcacaaccatctgttatgagatctggtgccctcttctgatgtgcagatatacatggaagcagaatgttgtatacataataaataaataaaatctttaaaaaattattctttgaaaaacttatacatttatatgatctgttctgatcatatctatctaccattacttcatagccatttactactactccacccccagcttcctctaagacccccatctttgtctatctcctttctaatgtcatggctattgtcagtaataaccctgagtccacttaatgttacctgtatgtgcatggatgtgagaccattcattgggaagcgagtcatgtactaggggtcacatccccaaagaatggtgactgccccttcctccgcagtcattgactaccgtagttccctctatcgagggtgtctggggacccttccttcatccatgctgaaattaagactgggttgaactcgtgtaggttttatgaaggtgaccatacctactgtgagttgaagtgtgcaaccaccatgttatgttcaaaagtcatcatttctcagctcctgttctcatctaccagctctcaaattctgtctaccccatcttccaccatgttctctgtgccttggatgaggtgtggttgttaaaaatgatttatctacatctaagtgctcacttatactcagctagtgtctgcattgaccatcacccactgcaaaaagaagcttctctgatcagagttcaaagcaacataaatctatgggtataaacagaaatatttagaaagctgcttgacagaataaatatatcataaaacactaacagtagctttcgaccaggtttacagtaccaggcgtgaaaccctgtggtacaggcctcatatccagtcagggagcagcatgttactctaataaccattatgccactatcgcatcagttggctcatttcaccaggttggtattgtgacacgcaggatccattgcaaggtgagacttgatgcctttttctcttccagtaactcccatagcaccttctggctctatgtaaacaagacagaaggcagagactttcctagacaggtgaattgctctatgtccctcatccaaaatgaggggtgtctgcagcaatagggtcctaccatttaataggcaaccaagagcaatggcaatacccggtgtttgtttggagccttactgaccaggaactcagagcgaggtatcccttggtttggcacttatttttttttttttttttttttttttttttttgtttctgtttaattatttgagacagggtttcactttgtagccctagctggcctggaacttaggcctagctggctttgaattcagagatacacatatctctgcctctcaagttctgaggtcaaaggcatgcaatacatgcctagcctggttagttttattgttacgttgacgtgtctgttggggcattgtcttgattgctaactgatgtaagagggcccagccctgtgtgtgtgtgtgtgtgtgtgtgtgtgtgtgtgtgtgtgttccttaggcaggcagtcttaagctgtataagaaaactaggttagcaagagcctagaatgatcctgagaatgagacatcaagcagcattcctctgtggtttctaccatacttccttgtctgtgattgagctcctctgtgagaggtggaatagcaagcatggaatagcaaggaggcctactttcaagtaacttggaagtgtaagccatataaatcctttataaataaaacactggtcagagtgttttatcatggcaacagaaagcaaaccagaacactcattagattgtaattcccagtgtttccccccttcctgcacctctattctacttgtgtctctatgaagttacttattctagctagaaatgaaactatttttcaaaatttcctttattagcaggtgcagagcaggcacatatctacacacaagtggaggtcagaggacaatcttatggagttggttctctccttccagcttgtttcacttagcatagtgtttttggataggcggtatagatcatattttcactttttttatggctgaacactatttgaagtttgtgtctcgttttactcaggaataatgttactaaggtcatatcatatttgctcaagtctttgacttcttttgggtggatacctagacatgaaactggtgggtttgtatttacctttataagaagccattatctgttttccaccatgcttgtcccatttttacctttcccaccagtaacgagggtcaagtttcttctccttgcttagtcttgtttttcatattttgacagtcagtggtggtcctagtggatctgaagtgctatctcatagtggttttggtttgcatttcccgatgactaatgatgatcaggttttcactgctttattagttgtttgttgccttagaatggtagagctgtacaggtattattgaggcatttcctctgagccatacccagtggttttgtgtgctctctctctctcttttttaaaggtgtttaatattaacgcacctctccctccactgaaagaacaagaaatgaaagaatccccttgttcgcctggctacaatcaaaattttacttcaacaagtacacagacaataacccaatgccaactcccagctatacacatagaacagacagcccaacctccagagaccggtatttaaacccagcactcgggaggcagaggcaggtggatctctgtgagttcgagaccagcctggtctacaagagctagttccaggacagcctccaaaagccacagagaaaccctgtcttgaaaaaccaaaataataataataataataataataataataataataataataataaatatatatttttaagtttatgaatgttttgcttgcaagtcctgatactttcagaagtcagaaaaggcatcagattccctggagctggagttaatggatgatttgagccaacacatgaatgctggaaatggaacccagagcctctatgagagaaactagtgctcgtaactgttcagctatctctccagtatcttgaactgttattttaaagatctgtttttatttatatgtgtttgtataccacatgtttatggaggccagaagagagcattggatctctttgggctgagattccaggcagttgtgagctgcctgatgtaggtcctggggtcctctgaaagaacagcaagtgttgttaactgctgaagcatctctcctgtcccctgatttgaattgtgaagagatgtaacgtcagtggctgctttagatttgttggttcttattttgaatttggctaccctggctacctggtgtgagttggcatcatatacttgttctagttgtaacttagttcatttattgtagcaccttgaaggctcattcatactgtgacatgtgccaggtttccttcctccataacttgagtaatattctgtttctgatatgtgtttttaaagggagaaaatataggttaggggtgtgcatgttacatatatatcaatatatattttgatatatgttgcagggtaccatcctgatggaactgttcaagtaagcaatggcaaccttgccttttacccagcacccacgagtatgtttcccagacctgctcagccggtagtcaggcatctgtgagaggatgtacacgtggagggaggttactaatgaatccgtatcggtctcctggtggctacaaaggtatgttttgaatcgagtgtactgagttattgtatatactttcctgcctcaaactggattcaattttgactttgttctgtcatttccatttataattgtctattagtaggtaatagagtgctttagaaaacttttacttatgttttatttattactgtttttcctgaatataagtgcagtgcttgcagatgccagaagatgttgtcagatctcctggtactagtctcagatagtttggtgctggggtctgaaccctggtcttctgcaagagcaaccggtactcttaagcattgagttatctctctggccctccagtatctctaatataactgttttctgcaacagacctaacttgctgtctgcaaagcatattgaagaaggggggttgatcagcttggttttcaagggggattttgatttttatatttgaatgatatcttttactgattgatttaacttttttttaaatttttttttaaagatttttatttatttattatgtatacagtcttctgcctgcatgccagcagagggcaccagatctcattcaaggtggttgtgagccaccatgtggttgccgggaattgaactcaggacctctggaagagcagtcagtgctcttaaccactgagccatctctccagcccatgagccatctctccagcccgatttaacttttaaaatgtgacataatcagacaaggctcattttcaagttactttcaaagtatcttgcagataagaacaagagaatttgagttcacataatggattcttgagatttagttatggtttcaagtattgtgatggcagcttgatattagcaaaaggacttgatactgaggttttaagtacctaattatgttagcctcgtcctcacccaaacccaacttgtatattttaacagcattccaagtcatcagaaaatgttgggcatggtggtacatgctttttaaccccatcacttgggagacagaggcaggtgaatttctgagtttgaggccagcgtggtctgccgagggagttctgtgacagccagggctacacagggaaactctcgtctcaaaaaaaacaaaataaataaataaattgccagcagaagtatggtatttaaaaaaattatttattatgtatgtagtgttttgcctgcatgtttgcttgcacaccagaacaggacaccagatctcattacagatggttgtgagccatcatgtggttagttactgggaattgacctcaggacctctgggaaaacagccagtgctcttaacctctgagccatctctccagcccccgtgttatggtattttgctgtagaaacattttagtatatttttagttatagaagacacagatctctttcactctggcccatggccccaacaaggtgggctaaaattgtagcctccttacaccagtctctgacaaagccagaagtggtatgacaaacaatacaagaaagcccgcgtgggcaaagccctagagtctaatccttttggaggtgtttctcatgcaaagagaattgtgctggaaaaattaggggttgaagtcaaacagacaaattcttctaccaggaagtttgtcagagtatggcttatcaaaaatgccaagactatcatagcatttgtgttcattgatggttgcttgaacttcatcgaggaaaatgatcaagttctggttgctggatttggtcaaaaagatcatgctggctgggtgatagtggcacatgcccttaatcccagcacacaggatgcagaggcaggcagatctctgtgagttcaaggacagcctggtctacaaagcaaggacagacagggctacacagagaaactcttgaaaaacaaaaacaaacaaacaagaaaaatcaaccaagcaaaaaaaaaaaaaaaaaaaaaaaaaacccaaacaaaacaatctccccccaaaccaaacccttaaaaagcaaaaaccaaacaacaacaaagaacctgccaaataaaagttattgctttaggtattattcttagagtctgctttaaggttgttaatgtagccagtgtttctctattggcaagaaggaaaggccaaccaagtccataaattttgacagtgggaacatagtaataaaatttcatattctataaaaacaaaaaagaagacatatatctaatgatgacattgtaagatctgtccaactttttccctttagtttaacttttagagccagagtttagtgagcttcgtttcccattattttatgtatgctgtttgtttatatattaggttttgatagttatagaggaccctcttcagcttccaatgggaattacaatcagctgcagctgcaagctagagaatatcctggaacaccttacactcagagggtaagtagttattgctactgaactgtggaacagttgtggatgtcagacaggtaaacattttccctatcatcaagggaagaaggaatttaaaagtgtgaagtactgtacatgttcacataagctatttactcttccactgtataggaaaaggtccagagggtaaatttcttgtttgtagttcacagcaagtaaatgggataaaaattacattgcaaatgatttaaaaaaaattgtgtcactaaattaccttcaagttaacttactttttatatataatagtagagttcatctttataagtttaactgttttgtatattctgatttgatgactcagcaaattttcttattttttgtatctgacaaaactgatttagatattccattttagtaagccttctaaactttctgtcatggttatatttgggttacaccagtatttttctttttttttaaagattttatttctttattatgtatacatcattctgcttccatgtatatctgcacaccagaagaaggcaccaggtctcataagggatggttgtgagccaccatgtggttgctggaaattgaactcaggacctctggaatagcagccagtgttcttaacctctgagccatctctccagccccagtatttttcttttaaaactttattttatttacttatttctgtgttttgtatgtgtgtgtatgtgtaccatggtacaggtatagaggtcagaggataattttaggaattgattatcatgtgggttctaaagatttaactcaggtcactttggcttggtgacagtgtcttatccattaagacttcttgatgaccctagtctttacatttgatttaaaaactgggtcatattgaataatttatgtgctcttcttgcttgctttactatgctcctttatattaagatgattgacagaggccatctatgcttctgaatttccatcattactcagcaccgtgttttttacatggtgttccctaaatgccaattaatctgtacttttggtgccaagttaaatattcatgtattcattttaggataatttccagcaatgttataaaagatcagggacatctagtggtcttcaggccaattccaaaggtaagggtaattacctgtatagatttgcccaaagcatgcttgtatttcactgtatcctctgtcaatttctctttaaagcacattgctttcagcatttatccattgaagttcattttgtttaactttaattctaaagtattgaatgaggcagtagactaccaagaaggatatgaaaactgtcaatttaattgtgtatgtttcttaaaaaatgttcttttctttacatgagcacaatttaacctttgatacaatgccacatgctaactttaggttgagtctgatggttcaaaaatgatgagttttttcttttttttagatttattcattgtgtgtgtgtgtgtgtgtgtgtatgtgtgtgtgtgtgtgtgtgttgcctgcatgtatatttgtacaccatgtgcatgcttggtgcctttgaagttccaaataaggaatctgattccatagaactggggctacagatggttgtggacaaccacatgggtgctgagaactgaatgatggctccaaaaattattattggtatgatttataccattgatatatggagcaatgatagatttgaataagcagcagttaaaacacagggtagtgtacttaatcatacttgttaatgagaagagaccattaaatgatttagtgtaattgaaaaagaattgcttaaaaaaaaagattactaaagagacatttttctttctttctttctttctttctttctttctttctttcttttttttttttttttttttttttttttttttttgagacacggtttcactgtgtagctctggctgtcctgtaactccctttgtagatcaggctggcctcaaactcaaagagatttgcctgcttctgcctcccgagtgctgacattacaggcgtgcaccaccaccacctggcaaagagacatttttcaaagcaaagcagtcttcctattttgaggaaatgatcatattgagcagtttttcatacagcaccaaaaacattattatttcaggcctggggagatggctgtgttgggtaaaatgcttaccatgcaagcatgaagacctgagttgagattcctagctttcatgtaaaaagctagattctgtggcagtaatatgcaaccctagtggtagtgggcaggtctctgaggcttgccaggacattctgtctagttcttggtgagctccagggtcagtgggagactctgcctcacaaaataaggtggagagggactgaggaagctatctgatgtcaacctcttggcttcctatacatgtacaggggtacctacacctaaatgttcacacacacacacacacacacacacacacacacacacacacacacacacacacacgattttaaaatattataacattaacttggaaatgagaaccaagcatttaccttgggacttagtcctcctgtcagaacatctctgaatggcttagttgttggtagttctaaaagctgatgtctcttttctaatcttaaattatcttgagctcttttgtattatctactttgagtagaagatttgtcactgaaaaattaactgaatgagagttatagaagaaaggtaagtaaaaagtgccccaatctggtcttagtctttgtcattgagttttggtaaattactcaatttggggaggaaggcaccacattttcttgacctttaaaaaacagaaagcagtcaactccagatttcccaggaccttctggctatattttattgcttttgttttggaatcttgtgttttcactagctgactaatgttaaatgacctgtgaaaccttccagtacacgtctatcccctgcctcagcaaatgcgagttgccttctcagctgccagaacatccaatctggctcctggaactttagaccaacctattgtatttgatcttctcctgaacaatttgggtgagacctttgatcttcagcttggtagattcaattgcccagtgaatggcacgtatgtattcattttccacatgctaaagctggccgtgaatgtaccactgtatgtcaatctcatgaagaatgaggaggtcttggtgtcagcctatgccaatgatggtgctccagaccatgagacagctagcaaccatgccattctccagctcctccagggagaccagatatggttgcgcttacacaggggagcgatttatggaagtagctggaaatactccacattttccggctatcttctttatcaagattgaaattcagttcggagtaaaagaatgaagttctcactagtgaatctaaggaaaagtaatccttgccctggtgattgattgactggttggggaaaatattttgttcctagaggaagaaagagatccttacttttttgttttcctctttatgtgaaaactttggagcagaatgacaattagcactaatctggcactttataaattgtgatgtagccttgctagttacacagtgaatatgtattgtttgcacttaaccctcaactgtgttaatggtccacttactgaactgactgcctcaacttcagacaagttacaatgccttgttgtgcctcaattaaaaaaaaaaatcttagactgcacctccagttgtttctgtttgcataaatgtttgattaagagatgagcattaatcactggtcgattcataagttcatgggttattttaaaagaagaccttacatgtactaggtctttctgggggttccttttctctgatacatatctatctcatttattaaaagatgaatgtttttcactggccaaactgcacattttccttgtacctgtttttacttccttgctatagtgtctcccttcttttagttacattttggtgtctgctttgtatattaaaataaggcacagtaagaaatatacatgtatgctctgctcttagtaagatgctgggtttaatttgcatagacaaagtgctgagtaatcaaaaagtttaagctttgtgtgtttatatcctgtctctgcaactcctaattaaccttgggctagcaattttacctctaggattgagctctcttttcttcccttcttccctccttgtttttaaagagtttcttcccatatataactggatccatgtaataggatagttgcaaaattctactaaggacatatctaaacatgtaacacattgctctagttttctcctcccccccccattctgaaaactagggttttgtggctatgtgttcactgtcttaaacagttcagcagccactgtacttttggcattcattggagaattttctcatatttcttagcttaaacttaaatttcttaattgtcactaaatatcttatttgtcagttaatataaggagttatttccagaagtactttgttaacaatattcaggaatatatgaaggattaaagaaggacatttttagctatcaactgatgcaactcatctgccaaggcagaaagttattttgattcttgactttcatgtccagaacacaaagcacatagagaaacactgataccattaaatgactgagggcaggacagtgttcagaagcagctagttatcagtctctttctcaagtctctgagtctttagcttagtctttattattgctacacaatcaatgcctttacaatattgttggcaactctgtcctctcatgttaagtcctataacaatagatttgctaattaggttgtcccgtagctgtcttgaatttctaggctggcctggaacttaaagagagagatctgtctatctttgcctcccaaacacttgaattacaggggttcaccaccatacctggctattctgccttttaaaacatactgtgtgtgtgtgtgtgtatgtgagagagagagagagagagagagagagagagagacagagagacagagagagagacagagacagagacaccgagagacagacgtgtattggagcgccaggtcagaagagagctttggataccctgaaactgggtgttacaggtgtttgtgagccactgtgttagtgctgggaactactgagaatccctctaccattccccccaccacccctttttttttgagacagggcattggggatttgatttgaactgaggttctcatgactgagcagcaagcactttacccattgagccatctctctagcccagatcagggactaaatgccttctttagccagaaactctgaacattcttttggcaaaggctgctcagggcttctggttactcatgatattttaacggctattatcactgacattaatatagtactaaaattcttaaatttacaaactgtatgcatattttatcactagatactgtgatgaagagccctgccaagataggctcttttagatggaggcgctcaagcataagctaaataacactaacagaaggatatgatattacctgagtaaacaggaagtgcattgcaaagaacatccaaaactctagaaatgacaaagacatctggctgcttgggcagtcacccaaaattcctctgcaaggttgaggcattcatctttggcctacaggcctagagtatctggcagactcttctatgaagcaggcattttgaaggactgtcatgccttgtattgacaaagttcagcaatcacttttttgtgtgtcctgaagaatgtctggcaggcttctatatgaagcaggaattctgaagggcagtcctaccttatcttggcaaagttaagcaatcactttcctgtgtatcttgcaagtccagtttatatagcatactgtcagcagttaaggcaaagctgtttcttcccaaatggctagccttgccacattgagagaaaactatatggagttttttaaatgcccatcattttttaaagattttatttatttattatgtatacaacattctgcttccatgtatatctgcacaccagaagagggcaccagatctcataacggatagttgtgagccgttaaaggctaggctcacaaccaaaaatataaataaatatcccacagcataaatggatgtaacacatcttaaaactaatattccacaacaggctgccacttaacatttagttttggttccattagtggttgaagagacatccgtaaatcatgcattatccaaatgctgtgaccattctgttggtccagactctgcaatggtgactcttttgtgggagcagtttagggatggggattatagacaactgagctattttcacagttcaggaagacacagaaccctttgctaccacactctggtcactaaggaattcagataggtaccaattccactgtaatacctttcctcccatggataagcctgtgaaggtctgctatcaaacagacccaacccatcatggtaagtggtgctcttatgaccatagggcatttggcaatgactgagtataaggttcttcatgccttgtaaaatgtacaaatttgtttttcaaaagagagaatatttattctccatatatggaaagcatttgcaatggaagtcaacaggcaaatattggtggacttctttttactttaagaagagtcctcagttgtcaattcaccaataatacaaagttagggtatcatctagctcaatattggtcggggttgtgtgaaccaagaacttattggcaattgcaaaagctgcaatttgttcctgtgtccattggaaattagccgcttttctagtaaccctaactatgatgtgtgattcgtatctgagttttgtccctgggtgatgggattaaaggcgtgtaccatcaccactttgttcacttgactctagaattcagaaaacaactaatttatagagatctgcctgtctctgctggaattgatggaatgggctaccaccaacctgctcaaatattttgccctgactccaaatcattcccactcttagagatttagaaaacaactttgaactttagcaacctttgaatttacttaaaacattttaaatctcttaactatgttttcaatactaaacaataaaaatatttaagaagaaaactcaaaagctgatgtccaagatggtgtgggctacttgggcaatctacagtctaacattttaacctgtaattaggacacatggcttaagaaaactcagttttcatttatatcagtaaggtaagtatgtttttggtaatttaccattcaaatttttatattttttacttttatttttcatgcctgatcaaattaaaggcatttgttagtctttataagttagtttggactaaataaccaagttatctgatgaactattgcctctctttattgtggaggtctctcctgttcaaatctaatctttatcaatcttgatggtacccatagcttttcttctcccatggaaacaaggcaaaacctcccagcaacataacatatcagattgtgaaattctgaggcttctagtgcatttcctattaacagctgatcaatttcatcattagtttgtgctagagggcctgatagacccatatgggatctgatatgtgttgtatacaatggatgatttctgtttctgattacttgttgtagttgaataaaaagcgaagttaattttgaatcatctgtaataagtccagtggtttcaacatgtaaaaaaaaaacacacaaaaaacaaacccttccgcatattgagaatcagtaactacattaagagattcaggaaaatccaatcacaccataagagtggcatacagctcttatttttttgtaactgaaccataagggctttgagccactttacttattttttcctgacctgcctttccttatttatttgcatccgtagagaatgttggggctccagaaattggtgggccttttactatatgaggaagaatccaattagttctttttataaactgaagtctcttgcttttgggatatttgttgcttatttctccaaaatattactgcaatatcccagtgttcattttctgcccacaatgagacaacttcaggattagtaaaagagatctcaattttctctgggtttattcctcctaattgataaagtatcatttttcctttcagaatcaattcagacaacttctctacacagatcttcaatttttaactcttgtgtactaaaaggttccattctaagatattattttctttctgcattagaattcctgtgggagaatgagtagaaggtaaaataactaaaacataatcaagctctggatccaagttatccacatgcatcctgtaatttctaccaaagacaactctctttgaggctcagctcatatttttcttggactatttaaatccttaccaccttctaaggtttgaaataaattagtaagttcttgagttgtcaatccagttgagtagtcatagtcagttactttcccccagcaatttttgaaaatcattaagagtttgtaattggctgagtgttggtggcacatgcctttaatcccagcactcgggaggcagaggcaggcggatctctgtgagttcgaggccagcctggtttccagagcgagtgccaggataggctccaaagctacatagataaaccctgtcttgaaaaacgaaaaaaaaaaagtttgcaattgatctctcctgatttgtattttctgtgattgaattttctgttaacctaattgacagaatttcctctttgtattttttttcaggagctatttgtaatccccagcaaggcaaaattctctccatcaaacatttttcccctaagttatctacatctgtgtcagccagtaagatatcatccatataatggtaatttttagattgaggaaactggtaatgagttatttctagttgctgttgttcaaaatattgacacaaggttgtgctgtttaacattccttgtggaagaactttccactgataactttttccctttttcttttctttcctttcctttcctttcctttcctttcctttcctttcctttcctttcctttcctttcctttcctttcctttttttggttttttgagacagggattaaaggccaccaatgcctggcactccactgataccttttaacagttgacattattataagtaggaactgggaaggcaaagtttcgtctaccctgttcttgtaaaggtatagttaaaaaaaaaaagtagtcttttaaatcactgtaatagactataacttaggtaataaagaaggcaagggaattccaggctgtaatgatcccattggctaaatcaccttatttatggttcttaaatctgttaacatcctccattttccagacttctttttttaaaagattttatttttttatttattatgtatacaatattctgtttccatgtatatctgcacaccagaagagggcaccagatctcataatggatggttgtgagccaccatgtggttgctgggaattgaactcaggacctctggaagagcagttggccctcttaacctctgagccatctctctagcccctccccagacttctttttatgacaaacgtaggagaattcccaggactggtcagttcttcactatgttgagcatttagctgattctgtaccagctgttctagttcctgtaatttttctgatgtcaatggccgtttttctacccatacaggtttgtcagtcaactgttttaaaggtcaggttgttggtacttttgaaagaccaacagctgttacgtcctctttatgtacaacctgaacagtctgtgactgtttgtgataatatcttttaaattttttctcagaagcgttcttcattttatattgtttctgagattgaaggaatgttaatatgtgtttttcattgctgtaacaaatcacgtccctgtaaattcatagctatattagccacatatggttttagttttcctatttgtccttctggctctatacatttgacacatcttgcagtttgttttatctgagataaagttccagtccttagaagctgaatatttacctcctgaagagtccaatctggaggccaagattttggtgaaattattgttccatcttcccctgtgactaccaaaccttttattttaatgtcatttatatatatgtttaactttggtctctgatcatttattgcagcttgccaaaatacttctcttctggactcttctgatttttttttttttttttttttttttccatttttaaagaaatgacttggaagtcaaaagatgagggtgtttggtgccctgaactagacttacaggtggttgaaggctatcatgtgggtgttgggaactgtttgttcctctaacattataccaacagcagccacagtggaaatttactcaggtcaaggtccatgtccccaagccccctggcagtgggtggatacatttgcatacttgcatacaggcctgagcagaaggagggaagtgaacacctaatgcctaaacttgaggcagagagagagaacaccaagggcaccttaggtcacccagcagggtctcaacaggaagcctagtcatgaggcgggacagccaaccccaagggcactgtaggtcacccagcagggtcccaacagaagctgttctgtcctttgttacattcagagcagtgttgtatagcaggactttctttggagcaccagctcccaagtaaagacatggagatttctgattaattatgaaaacttgaccttagtttagggttgttcccaactagttcttaaaattacatcaacccctgtttatatttatatgctactatctacgtagtaccacatggttcattacctttcctcagtacagtaggtacaactttctccacgtctggctggagactacctcacctctgagattccttcctagagctttcatctcttcctggaagtcctccctatgctctcctgccaaggtgtttgctgttctgttctttattaaaccaatcagaaggtgccttatgctgatgagataaaacagagatacatcttccaagtgtataaaaagattatcccacaatggtgttatttttaacaacagacattaactcttcaattactctgtggatgagtttctgactggaaatgattgaatcaaatttgatatcagggcctatatgaggcccctcgggtccttttccaatggcaaagggttatcttacctgttcctcactgaactgcactgattagtcctttgctagtctttgccacaccttctgcatgctccagaaggcttggactttctctttggattatctctaaaacaaaaattgtttctaggaaggctttacctacaatcccttttcaaatgaccttgcttaccacaattaaaacatctgacattttgatttttttagaaattacttctatcagagtatcataaatgtgagatgcaggatcagcttccaatattgctgctgccaaatctttatagtcttctagtcttttgttcttagttgcccatgaatttaatttctacttcctataggttgaatgcatacaatgtgaaaatgaccacttccttaaatctcaaatctaatatttctatggattccgtttaacttcttttgggggggggcaaggtttctctgtgtagccttggttgtcctggagctcactctgtagaccaggttgtccgggaactcattttttaactgcctctgcctcctgagtgctaggaataaaggtgtgcaccaccaccacctggcaccatttaacttgataaccttgcaggtgcctatcatctgctggtagttcttgtatagtaaccagataaactaaagttggtttccttggaaccttggctacattccaccatctcaaacctcaaagttaatgtctctcccttctactgcctgtgcatctctctatccatctccagacttcctcttactttctatggtttttcttgttcacttcctgtccactggttgcttgcttcaactcttgacctatggttgactttattgaatcctgtttataataagcagaaagctcttggcttaaaggtgtatgttgaggctgaacaacatcacaactagaaaataggtttgttttggaataatctttttgtgcactgtgaagctgtgccactctgatggtttaataaaaagctgaatggctaatagctaggcagggtttccaggcacagagaacagtaggaagaagaagggcagaaatgccaggagacacagaggaagcagtatgggcaatacagagtaaagttcaccaggccacttaaaagaaagtaggttaaaagatatgtgttaatttaagttataagagctagttacaagcaagcctaagttatggccaagctttcataattaataagtctctgtgtcatcattattggggagccgatgagcctgatgaaagagtcttgactacaaatggtgcctaaattggggcttgaaccctagaccctgagattaagagtcttatgctctaccacctgagctagctgggtttaagatataaaagctagtgggacaagcctaagctataggccaagctttcataattaataatgttctgtgtcattttttttttttttttggtgagctggtagaccaaagaaaaatccatctacacagtttttttttttctagtaaataatgcaatctttaggtttacagtgtgatcaaatatcctgccacacagaggaactgatgttttcttctggcttctctgggcactgtgtgcacagacatacattcaggcaaaacatgtgaaataataaaataattaataaacagaataaaatacagctccaaccagggagagacagtttcatatgaggaattaaaaaaaaaaaagtctactgcatttggtccctatagggaccagtgctgatctttacttgtcagttccaagagaagcaaggctagaaagtgtgagaacagcttgaatggtgaatggaaagaaagaagtagcaaatgaagcgcgctctttgccacaaaatctggaaaagaattaagaatcagcagtacttaaagtttttaagtttttcctttaaaattttttcttttaaagatattatttatttattatgtatacagtgttctgctggcaagtatcccttgcaggacagaagaggggaccagatctcatcacagatggttgtgagcatcatgtggttgctgggaattgaactcaggtcctctggaagagcagtcagtactcttaacctctgaaccatctccagacgaaagatgatttttgttttgttttgttttgctttgtattgagatagtcctggctgtcctggaacttactttgtagaccaggctggcctcaaactcacaggcatcagcctgcctctgcttcctgaattctgggattaaaggcgtgcgccaccatcaccctttttttttttttttagacagcatgtagctttgttgttcaggctggtgatcctttcaccccagtcttctacccagctagacaggttgttttagactgaaatttagctagtagggagaacaaggctggacatctaggaaaaaaacttacaaattgttagcaaagaacatgtaataaataccccagatttattttatttttgttaggatttttttttagatttgttttacacatcttagtgttttgtttgcatgtataactcatttcagcagccataacagcctaacacgtgcttgcctgaccttgccttggtcactaggaggtcagatgcctgcctcatggcaaggaaccaatcagcagttagctggtgttgctatgctttacggctctgggtgtgctttacagacaagtgcacagcaatgatgtgcagagcatagcaattgctctgggagggcctataggccataacaaccagttgaccaatcaacactgggcaagtcctccaagcctggaggcacaccaatcctgagcctgtgtgtacccctagacactccccttatgctgcccaataaagatctctggcttcttggggtcttttcctagccatccactaatggggttaggtcgttaactgcaataaaacctcttgctgtttgcatcaagtttttgcctctgcctagtgattgattggggtccccgaaggcctagactgagatcctggggacctgagcctctgggggtctttcattaccatgtacatgccttgttcctgaagaggtcagaagagggcattggattctctggaacctgcgtcattgatggttgtgagccaacttgtgggggctgagaatggactctggnnnnnnnnnntcataagcaaagtgctcctaactgctgagtcattcccctcccccccccatttatttaatgaaacattatgcaaaatagagccatggtctggagaatatgggagaggtcctgttcaggatgtagggaatgaggttcagaggtaggtacacagtgatgaatttggggatgggtgaatactgctgtcaggggctttgctcattttggtagggctctgtaagatggagtggggtacctgctaacattgttgaggtccagaacaggcagagctggttaaagacaagggacaggattgatcgatggatgtgaagaaaaagcagcactgcaaacaggtgttctttcctgcggacacatcatggtgtcgatgaacacagtagttgaattgggagacaaaaaaacaaacaaaaaaacagaaaagaatgtgtagtctgggaaaattgctcaagagctaaggaataagtgagttagagaacaggtgtagcattgttaagggaaagacagaatgggtagaaaggactacattgaagtgaggctcgtgactggaatagcaagcagcatttgaaaaactgaagccacaattttcagaccagcctaggctataaaaagagatcttgtatcaaaacacagggaggagcgtctcttagagttaagatttcacaagtaaaggaaattggtggtgggggcagaaaaggcacgatttccaactgaaaatgcatttttttataactttgatggctgcatgcataaaggactgaaatgggcaatgctggaggcaacgcgtcacagcacacgttctgtctcattttgtaactttttttttcaagacagggtttctttgtggagccttggctgttctggaactcactctgtagatcaggatgacctcaaactcacagacacccgcctgcctctgtctcccgatagctggaattaatggcgtgcgccaccgtggcctgttctcccccctttcctttgtatcttcttaaaacccagttaactgaaccaatatattgtcattatatgctcctggcagaatcacaagccttcagcagcatttgcccacatcatctttacggtgtgtgtttagaaccctcttttgggttcaccagaggaaaattttgctgatatttctatgcattgcagttgtggaaaggcaagttccttcttgcctttcacgatgaaagtctggacatttttggcactcttagacatatagtttttcttaccactgtgcttttacaccctaagaatatatacatatacttgattgtctttctattaactatgagccttttcgtacaaacttgcattgaatttcatcttgttataagatacctaaaaattatagtcttctgtttggaaaacacattttaaaaacatgttccaagagtgaatggcaagataaagggtggctctcatacactgaaggaatccccttctgtaggctacacgatttcaaggttccagcaagtttgtctcgaaaaagctcaattgttgtgcccagaggtcttgaacaaaaggtaccactccgtttagctacgcctcatttgcagcaactgtaagtagatgccnnnnnnnnnnnnnnnnnnnnnnnnnnnnnnnnnnnnnnnnnnnnnnnnnnnnnnnnnnnnnnnnnnnnnnnnnnnnnnnnnnnnnnnnnnnnnnnnnnnnnnnnnnnnnnnnnnnnnnnnnnnnnnnnnnnnnnnnnnnnnnnnnnnnnnnnnnnnnnnnnnnnnnnnnnnnnnnnnnnnnnnnnnnnnnnnnnnnnnnnnnnnnnnnnnnnnnnnnnnnnnnnnnnnnnnnnnnnnnnnnnnnnnnnnnnnnnnnnnnnnnnnnnnnnnnnnnnnnnnnnnnnnnnnnnnnnnnnnnnnnnnnnnnnnnnnnnnnnnnnnnnnnnnnnnnnnnnnnnnnnnnnnnnnnnnnnnnnnnnnnnnnnnnnnnnnnnnnnnnnnnnnnnnnnnnnnnnnnnnnnnnnnnnnnnnnnnnnnnnnnnnnnnnnnnnnnnnnnnnnnnnnnnnnnnnnnnnnnnnnnnnnnnnnnnnnnnnnnnnnnnnnnnnnnnnnnnnnnnnnnnnnnnnnnnnnnnnnnnnnnnnnnnnnnnnnnnnnnnnnnnnnnnnnnnnnnnnnnnnnnnnnnnnnnnnnnnnnnnnnnnnnnnnnnnnnnnnnnnnnnnnnnnnnnnnnnnnnnnnnnnnnnnnnnnnnnnnnnnnnnnnnnnnnnnnnnnnnnnnnnnnnnnnnnnnnnnnnnnnnnnnnnnnnnnnnnnnnnnnnnnnnnnnnnnnnnnnnnnnnnnnnnnnnnnnnnnnnnnnnnnnnnnnnnnnnnnnnnnnnnnnnnnnnnnnnnnnnnnnnnnnnnnnnnnnnnnnnnnnnnnnnnnnnnnnnnnnnnnnnnnnnnnnnnnnnnnnnnnnnnnncccttaccctcactctattcttctaagcagtctcgacattgttccagtgttactttcaatatttcctatcttttttttttttgtccctactcttctctctctctctccctctctctttttttttttatttttcttttctgagacagggtctcactatgcagttgtggctagcctggaactcagaaatccgcctgctgcttctgcctttctgcctctagacttctgggattaaaagtgtgtgctgccaatctggtccaacatttgaagattgtaataatcataagctctgcttctgcacatgtaaagagggaccaggggccccttactaaaaagtacacattaaattaaaatctcctcgcatggcttagcaattgtttggaagttgctacaagtgtgaaggattattacttaattagtggatcttaaggggttgccaggaccagtctctgctactctgagaactattgggcatggggattatggggcttcatccctgatgtaaagaatctgaaaagctcggagtgggaacaagtttgtaatttaactggcttcccaaggcgattctgtacctcctacaatataagggtgcttcttggccagtgtgtctctcctggttgagtttttaaaagccggtgggttttgaatcttgaaagagataatactaaccgaaaatatgtgtggagtttgaggtatttgtgaatcccgggtccccaagagataaaggagagttgagactcctgttacggtctatttggctcttctgtgggagtgttcaaccaagaattcttgaggccctatttgatttccagccctgctcaagcctgtaatcctaacacacacaaagttgtgttgaatgaaaggccaaaaaggatgctttgatgtttcagaaacaggctgtcaccctagagtaagagacacttagagtcagtgcctgtcccagactttgtagagtactatctggattaacagtcattaggatttagttagtaagaatgccacgagggttggacttgcaacctgctggtgtgtacagtttgacttccagtttgacactgctctcaccacgttgcaagatgtccctttgatagtgataattgggaacagaactttgatgccatgttacactttctgctcatagtcaaaccttgcttacttctgatttgccatcatgtaagtgcagtttatatttggaagcagaaaaggcttggagcctgcagaaccaggagaggttcaattccatgctctcttcatagtgttttaatccaaattctgtctttactcttccctgctcccatctattcatctcaccagagaccattttcttggttacttacgttttacagtgtgaggccctaggctcatgcctgacaccacaaaaatcaatccaaagcaacaaggtaacattgctgtgtcattcattcagcaggtgcatcttgttcagtgttttggattgtattatgccttcaataagtttttgtacttgaagtagaaaaattagatatgatgttattttatcattaatgaggtgcgattttggtattgggttttgcatgcttgtcccttagcacccctgtgctatcctgtctggctgcatgaatgaaaaagcatctactgtgaggaattagagcttagagctcttttacagttccccctccaagggtctcatgtagcccaggctgtctcaccttactgtgtctccaactcttgagtgctgcatcactgtgtatggttggtgtggtgctgactctggagcttggggttctgtgcatgctaggcaaggtctctgctaactgagctaccccccccacctcttttttttttttttttttttttttttttttttttttttttgttctttcgtatttttttctgttcttcccccctcctcttccctcctccatctctttgacatagtgtcttgccatggagcctgctcctcctgcctcagcctcctgtgtgctagaattatagatgtatactgcctggcttttttatttctttggtggtataggggttttgctcatgctaggtcaacagtttactcttattctcagccttaaaacatttactttcattaccaagttctggaattcctgcttttttttgatttttcaagacagggtttttctgtgtagttttggagcctgtcctggcactcgctctgtagatcaggctggccttgaactcacagaaatccgcctgcctctgcctcccaagtgctgggattaaaggcgtgtgccaccaacaccgggctatgccttatgttttttatctttttgtggtggtgcttattggttgggcccagtatcacacatgggaggcatacaccaagctactacatccttagccatccatcatcatctttgctgttaggaatgatgagttatttgctgatttgtgttctaggcattggtgtgaccacatgttagttgggggagacaggttatgagttgtgcagagagcagcctacaagtgtgttggaataaatagatgggattgtcattttctaaggagacccggatgttgaaacaagaaaggcaggtcaggttcagggcaggagcaaagagaacaagtccaggaaggcttcatcccacccaccagctggggaactacagggattggtgggtcagagaccaggaatctcaagtcttggcattgtatgagtttttataaaacatagaatttaagtaagaaacacaacagtttattttcagaaagcttcacagatacaaagcaaatatacccacgaagtcattgagaaatgagtcatctttttgttagacacttgaagcccaaagaggaacaacgatggggtattattgtgaggggagtggcctggaaatgcatctgcatttgccctgaatgttttagcttgccaagttaacataggccaaatcaccaaagaagtcaaaagtttcaacagttccttaaaatggccaacagttgcaaaacaggagttccgaaatgtgtccaatggcagcaacagttttaataagtagcattagtctaagtgcacaggttattttgtgtctatataagagtttttaagaactgaagtcagtttttatgattataataaactgaggatgtttatttttgatttacgagacctttcactattcaaaaagctataaacctaaattatttttataatgcgtatgttgaagttgtagaagactgagttaaatcaatattaatattttccccataaaaactgctattaagctggacattggtggcacatgctcttaatcccaacaggaggcagaggtgggctgatctctgtgagtttgagaccagcctagtctacagagcaagttccaggacagctgaggctgcacagagataccctgtcatgaaaaataaaaacaaaacaaaacaaaacaaaaaaccctaaacaaacaaactgttgttcaacacacattttttttttttttttttttttttaagacttgtttttgtttttgaaaccaggtctcactgtgtagctctggctggtctggaaattgatatgtaaatcatattggacttaaagagatccacctgcctctgcctctaagtgctgagattaaaggcctgtgctgccatacccagcaaaaagatttattcttaattatattcatataattaataattcatataatgcattttaatttgtgtatttttttttaaagtctgtatgtatatgggtatatgcaggtgtctttggaatccagagtcactagaacccatggaattggaattacaggcacctgtgagcagcttgacttagtgctgggaactgaatttgcatcctctggaagagctgcagatgttctctcctaagcccctgctttgttttgttttgttgtttttttttttttttttttggctggggtttcactgtgtagctttggagcctatccttgaactagttagctcttgtagaccaggctggtctcaaactcacagagatccgcctgcctctgcctcctgagtgctgggattaaaatatataccaccacacccagttggagaagtccttttaaaaagtttcctggggcctggagagatagattagcaattaagagctgttgcaggatatttgatcacactgtgaacactgagattgttaattaatgggaaaacctgtttctagctgtggtgtggcttagccctagcacacacctttagtccaagagctttctgcttgaataaaatcaaccataggtcaagaggagcaagcaaccagttgacaggaagtgaatgtaggattaagggaaaaaaaaaaaaaacagtaagagggagtcaggaggatagatagggagacgaacaggaagtagaagggagggaccttcagtttaaagaattattttgagatggtataggagaagggagaggtttctgggatatcggatgaggaggaaggtcagttgggtgctctctctgagctagcaggctttcacctcagtatctggctcctgagtctttattggtgaaattgaatattttgttaatatttccattggatgctcttccagaggtcctgagttcaattcccagcacccacatggtggctcacaaccatctgtaactccagttccagggaatctgactcctcttctgacttctgtggagaccagacacgcaagtggtgcccaggcatacatgcaaacaaagcactcttacacatgagaatagatttaaaaattgagtggtttggcaagatgacttagtgggtaaaggttcttggccttcctagcctgatgaccagagcttcatctagaacacatataaagatggaaggagagagtagactccacaaattgtcttctgacctacacacacacacacacacacacacacacacacacacacacacacacacagacacacaagaatttttttttttttttttgaggaaaaattgagtggtttactaacttagctgtgtctcaaagggctacatggcccatatgggctttagaagatgtcaagctgaatggaccctacgcagtgttcaaggtctggtttctctccttgagaatatcttgggacttctggtagtatcagtgggcaggtcaagcggagctccagggatgtgcagggctgtgggatatctgtgcaaatatggtcagggagaacggggttctgtgctgtttgtgcccatggccagtctcaggaacagatcagagtaaacagccagtggatgaaatggtccaggcatcaggctgaacaggaagttgttatcgtggactctcgagacatcgtgacattgagaagaatgtgcctagcgacgcccgcccactgctgtccatgctgctcagtcccactcaggaccagcctctctctagcacatggaaatttttggtttttttgggcatttttgttttgtttttatttttttgagacagggtttctctatgtagctttggagcctatcctggcactcgctctggagaccaggctggcctcgaactcacagagattctcctgcctctgccttccgagtgctgggattaaaggtgtgtgccaccactgcccggctaacacatggactttttttttttaattttcatcttctttttacatttgttttgtgattttttttttaaagatcttatttatttagtatacagtgttctgcctgcacggcagaagagggcaccagatctcattacagatggttgtgagccaccatgtggttgctgggaattgaactcaggatctccggaagagcagtccgctgagccatctctccagcccaacacatggaatttttaaaaacatattgtattcgttttttgtttgtcaaaaaaaaaaaaattcacatcaagaaaattaaagcccagataatctgggaggaaacgtttgtcctgagtaggttatgttagtggcttttcttcttctagtaacaaatacccgataaaagcaatttaagagaggaagggtttactgagagtgtagtccaccatggtggttaaagcatggcattaggagcttgaaacagctggtcaccttgcagtccacagtaaggaagcagagacagctaaatgctggtgtctgctggcttgtttcttttccttcagtgggggaccctggcccatgggctgattcagcccatgtgtaatgagtgtcttcctgtatcaattaactccactacagatttccttcagaaatgtctagaggcttgactgagagttgaatgtagatcccgtcactgtgacaatcaatattgactaccacagaggtcaaataaaaggctgagatcataaatccattagtagctcttagagttgattaataaaaaatgaaatatcccctctcaaaggataaagggttttataagacatttgtagaagaaatgaatggtcaacaaaaaggcccttgagtaacagaggaagtatcatttaagatagtaataagattttgaagtttcaaaagtccttgtggtaggtgaactcccgtgcagggctagagagctacctactttgagctacaattttttttttttttttggtttttttttttgagacagggttttctgtatagctttggagcctatcctggcacttgctctggagaccaggctggcctcaaactcacagagatccgcctgcctctgcctcctgagtgctgggattaaaggcccggcgagctactactttgagcagagcattttgggaatatatgccaaacatcataaaagtactcatatttttattcattagttataagaattttttccacttaaaagtattttcataatcttcattttacctcaggatttctttaattgtttatggtttttctttcatttggacagtaatgtattctgtaatggtgtgtgtagctattcagaatgccctgtttttacaaagcatttctttgtaatttcagtcctacaagattattaattttgcccccagcttgcttcggatcatagtctccgaccaggtggagttcccagttcgtcaggcaggtaagtcgccttttcaagttaatgagagttctgccttaaatctaaatagttataatgcactgtaccagacctgttcaacgaaaaatttaataattaaaaaaacacttgtacaagatcatgacaattaaaattccagcatagatccaggaatgacccctaaagccccgcccctatgggcaagtttgatggcagttgatggttgctggaggagagagtcactctcctttggggatatgtggttgcctcagtgaatggccacacacccatgttcatagggcatcaccaatgtgactcagggctactaactatagcaacagaaaataacgaggcaatgacaatgggaagaagatgtcatctcagtcactaggggagttgagggaaggtaatggtggatggatatgaccagtattcattatccataatcggatttttttccgtcagggaccatccgctcccctgtaacgacatggagccttactactaattatgaaagctcaactgatagcttaggcttgacttaaattaacccgtatcttttaatctgtgttcttttatgtggcttggttacctttatgctgaactgcctattatgcttcctctctgcctggctggtgactccacccttcttcccagtgtcctccgtgcccggaaatcggtcattcacctttttattagaccaatcaaagtggcacatcttcacagtgtacaaaaagattattccacaacatttcccccctttgtctaaataaaaaggaaaggttttaactcttacacagtaacactatatacaataagaacaattatcaggtaagaattacatttgtaatatctagtgcatttgtatttggcagattcagagagagtactgtattaattatctaaatgtatggaacattcaagtaataaaaaataattaaaaaataaaaatcttttgaaaaatttggaagaaacacttctaagacataaaaatattttcttgctgggcagtggtggcgctgcctttagtcccagcacttgggaggcagaggcaggtggatctctgtgagtttgaggccatcctggtctacagagtgagtttcaggacagccagagctatatagagaaaccctgtctcgaaaaaaccaaaaaaatttttttttcttttctcttggaaagttagcagtagatactgagttctcacatttaccctaggtgatttttttttgttgttgttgttattttaatctctttgctgccatccgtcagttccttgcctctgtaacattgctgttttacattttaatttcccaattttagtaatttatgatcccttcatattaccttaggtcacctatattaagactgcagatttatttatctgaattctagcagcaatagtgtcaagtcacatagagacttcttattaattatgaaagtgtggctgatagctcaggcttgtttctaactagttcttataacttaatctgtatctttaagtctatgtttatttatttatttatttatttatttattatgtatacaaaattctgcttccatgtatatatgcacaccaggagagggcaccagatctcataacggatggttgtgagccaccatgtggtttctgggaattgaactcaggacctctggaagagcagacagtgctcttaacctctgagccatctctccaaccctggtctatgtttctttatgtgacttggttacctttaatgccatgtggcttgctctgtgtccctggcctcttttcacaactcctccctttttcttcccagcatcctctgtgcctggaaatcctgcctagctattggctattcagctttttattaaaccaatacgagtgacacattttcacagtgcacagtaagattattccacaacaattcctcgaagtcgccgtgtttgtgctcagtctgaagacatatatatggtttccaggtcatttctgtgtcatttaggatgtcctccagcttggtgtaatgctcctgctttgactcccacgagacactcttgagctcttcgcatttccctttcccaagttggccctttgtacctctaagggttttcatccctgttgggcgtggcatcccacatggaaggctgttcagtccttgtgctccgtgtgattgagttgacgtgatcttcctgattccagcatatctgttcttctcttaaactcagctgccatctacctgaagaatatggtgacacagtactggccagacagggagcctccaccaggagaagcgatatttccatttaatatccatgagaatgaccgacagcaaattcgtgacagcattgtggaggggataattcgatctccggatctggtgaggtaggccatgccctgtctatgtgatttgaggaggcagctggccttgactgggactgacaattgggtgtaatcttcagctttgtgtgtgtgtgtgtgtgtgtgtgtgtgtgtgtgnnnnnnnnnnnnnnnnnnnnnnnnnnnnnnnnnnnnnnnnnnnnnnnnnnnnnnnnnnnnnnnnnnnnnnnnnnnnnnnnnnnngtgtgtgagtgtgagtgtgtgagagagtgtgtgagtgtgtgtgtgtgagtgtgtgtgtgagtgtgtgtgtgcgagtgtgagagtgtgtgtgtgtgtgagtgtgtgtgagtgtgtgtgtgagtgtgtgtgtgcgagtgtgagagtgtgtgtgtgtgtgagtgtgtgtgagtgtgtgtgtgagtgtgtgtgtgcgagtgtgagagtgtgtgtgtgtgtgagtgtgtgtgagtgtgtgtgtgagtgtgtgtgtgcgagtgtgagagtgtgtgtgtgtgtgagtgtgtgtgtgtgtgtgtgtgagagtgtgtgtgtgtgtgtgtgtgtgtgtgtgtgtggtttttacttttttgaggcaggtctcttgtatcccaggctggtctcaagtgtactgtgtgacccagtgatggccttgaacttctagtcctccagtcttcttctcaagtgctgggattacaggtgtataccactatgatagctgtgtgtagagttggagcttaaacccattgtgggcaactttaccagctgagctatgtctccagcccaggaaataagtttctagctccatgaattggacagcatagctgtggagtcaagcattttgcagtcttaaaatagaaacaaatttacttcaacatatgatctagtaatgaagttttctttgcaaatggaggggaagcacaacagatgaaacagtgttggtgggtgagattatttaaccagatattaagtgcagttatgatgaaaacaggagaagaaaggagatttgagggagacagcaacaggaagaataagcgttgaattgctgtgtagttatttttcttagctaggagaacacaggtgtgctcactgcagaacagcatccttattctcattggttgaccacatgctaatcgtgttcccggagcctcgcagaaccatagcatgttaatctgtgaagatgcttgtccctgaccgcctcatctcccagtggttcttagcaacacgggagtagcttctcctgtcagtcttgctcttggcttggagtgagaaatggaccatgaggcccatctcaagatgaaatcttaaaagatgaaattttagctatactttctgccagtgttgtttaaaggaacagctgctggcatttgaaggggttccctgtttattctgagacagccctctgtggctttggtctccccatgtcctaaataaagccgcctgaagactcttctttttattgcctgattttgtctaaaagtattgcagagaaacttgatttggttccataaggaaggttcaatatgctgcttacctttttccagtttttgtggatctaagttattggatattcaactgaacactagtttattgtttatttttttacagtttggaatcctgggactgaggatgtagctcagttggtacagcgcttttctagcatgagagcttgtgttcattcccagcactgcatacagtggtgtcatgtagtgtggcatagtggttcttgtgtggatctcaggactcgggatgtaggaccaggaggataagaagtttaggatcatcttcagctacatattgcactggagatcagtctgggatgcagtaaaccttctcacaattaaacagcccaccaaaaactgcaatttgggtcctagttttgtcaggttaattttctaagcaaataaccttatgtagacatacttggtaatttgtagaagggacatttttgtttccctttattttctttttaatcttaatcacagcgagatcccactcgtgattaagaagtgatgcctgcaccaagtgttgtgggataatatcttgcatctttctgctaaagtgggaggtacccctctccttctgttttatttctttggttgcttttttttttttttttttaacttatttctttgaccttggttcctagatttctccttttcagaaattccctagcaaatccatatttgttttattcaaagtacaaaaattagtgtgtacttttactggtacagtatgccatactgtctcttaacgaatgagaactatgtttttccatttgatagatgtgtgtgtatgtatatatgtataccttacactttgagaggtgctctaccagccctagggctcactccagccctaggcttgcccatttggtagatatatgtgtctctgtctaaatgtgcttgtctgtctgtctgtctgtctgtctgtctgtctatctatctatctatctatctatctcatgtatctatcatctgtgtgtttatctctatatatttatgtgtgtacgtgtgtattatttatttatctatgagtgtgtatacataaccaatgtctattttattatcccttctctttgtgtgtctgtctctgtgtctgtctttgtggatgtgctgtagatcaaacctaggaccctgtacatgctgctccttctggatatgaagacccagatataaaataagtaacgatttttatagagttgaggcagatttgctgaacacctggaaatttttttacagtctttttgaatttatttatttattctttaaaaaaaataatttatgctttatgaatactctgcatgtatacctgcatgccagaagagggcatcagatctcattacaaatggttgtgagccaccatgtggttgctgggaattgaactcaggacctcttgaagagcagcagctaatgcccttaaccactgagctatctttccagcccttggatttatttttaaaatacctttaggctgggcggtggtggggcacacctttaatcccaacattcaggaggcagatgcaggtgaatctctgtgagttcaaggccaacttggtgtatggagcaagttccaggacatctagggctgctacacaaagaaaacctgtgttgaactctgcctccccccccccccaaaaaaaaaaacacctttaggataagatgaaggtatatatttgaggagttcccccattctgtttattttcagtagattgagtcactgaggtttttaatatgatcacttttcttcacacccctcatgtatacagtcttttgctgcagaggttaacaatgtatacagtggtatcccatgtgatttacatccccttagatgcaactagatggacatcttaggttataaaggtatactctggtattcacacatttctcaatgttatctgtgctcagtggtgcctgactgtaggtgtaaagggagttagagaactttttaagaatacccatagttcttttgtggataatactcttaactgcttgcatctgggcatttttttccccccatgttacagagtccagttaacaatgtgtctccgagtcatcatcaaacatgattttcctggtcactggcctgcagtggtcgacaagatagactattacttgcagtcaccaaacagtgggagctggcttggcagtttgctatgcttgtatcagctggtgaagacctatgagtaagttcgtttctactggcagaagagagccagtgtcctgtggaatcaggcccattgagcctgagtgctgagattacaacccaggtcgtttcccttctttaagacgatagttcagatagttttatggaatttctatttagtaaatgttttaggttggcagcaccgannnnnnnnnnnnnnnnnnnnnnnnnnnnnnnnnnnnnnnnnnnnnnnnnnnnnnnnnnnnnnnnnnnnnnnnnnnncagctttcattttacagaatgaattaatatgtgatgtgagttaacttaaacactagaaaacttcctatataaaattactagatagtcttggacctttcttttttttcttcccttttctttctttcttcctccccttatttttttttccctccctccctccctccctcccttcctccctccttccttctttcttttttgttgagacaatatctctaagaactgggattgcaggtcttcagttttggactcttaaactagtcccaaccttttaagaaaggtttcgtgtctgcccaaaccaagactttattctctcaaagttccttccaactttattccttccaactgcatagaacatttaagctgcattttgcatgtttctggcttcacgtggttaatctttgcttctatctcattgagaaggagagaagccatcaccttctttattctctgtctcatgcagatataagaaagcagaggaaagagagcctctcctggcagccatgcagatatttctgcctcgaattcagcagcaaatcctgcagttacttcccgatgcctcccattactctgtgttgctacagaaacagattctgaaaatcttctatgctcttgtccaggtcagttctacttcagaatacaaccatggggcctcatatttgtgtgtctaccctgtagaaatgtcattatttagaatcacatatttttaagatttatttttattttatgtgcattaatgttttgcctcatgtatgtctgtctgagggtgccagatcccctggaactgaagtcatagataattgtgagctgctgtgtgggtgttgggaattgagcctgggtcctctggaaaagcagccagtgctcttaaccactaagtcacctcttcagcccctagaatcatatgtttttaccttaggagaatcaggctcacaaaagttaactcagtcagccatgagcactgggtatgcaaggttcagtttggtgtctgtggctgttttctcagtctcaagtcccaactcatgaagagcccatgcgttgtttgagcttagattcaaggtgccctgtctgcaggtcggctgtgattggaggaggagaggaaggaaacacagagtcctttttcatgggaagtcacattgatggccttttctcttcttctgccaacttcaagccaacacggatttagtggctccccccgggttttttggggggggggctggggggnnnnnnnnnnnnnnnnnnncatggtcagggaagaatgattttggtaaccagtgctgggccaagacttcttagagtccggcccagatcactttagccatatttaagcatggcatgattttgaaaaaagtactcagataaatgactatggcaaagcttaagacatgtttacattgaagttcttagcaaagtacatacagcttcatctgtaagatggtttcttgtcttagaaacattgttcaggataagggcctctaaggtaaacttaatgcctgtaggagtcagtattggcctggccctgagataacacagacatcacttagtctgttgtaaagtgcaggtgacatctctcacaaggaggagtctcatggcctagaagtaaagctcaaggttttagggggaaagtctgggataagcaagcacaatattctgggggatctgggcagatcctggcccaacaggtagcaaagcattaccaggttgtaaactaaattttccccagcgttccaggagaaacagctaaatatcttctccctttggagaaatgagctatatgtttaattttccctggcttctgcagtgctcatccgtgtgcacaaggcctttttgctctctatgtattttctgtgatttaagccgatccccttttcttatgtgaaactataaaggatactagtatggtagttaaaaaaataatgggaagatagagttggaatgtttctaaatttgagaatatttaacactgaatccttgaaaaacctgagtaaatgctttcagcctgggaagaactggggtcagcctgaaagtgatgtcggattaaaactgttttgtgtgctttctcaacaattccctgtgacgtgagggtggtttagttgagctggggtgacaggcgagttgggagttgttcttgttttattcaacttgggcgcctttggactattttagggttataataaagtctcctctcataagctttttgtttttattttttgagacaaggtttctctgtgtagccctggctgtcctggaactcgctctgtaggcctggctggctttgaattcacagagatccgcctgcctctgcctcctgagtgctagtattaaaagtgtggccacctcacctggcctcataattgtttaataaagtcagttgcaagcaggttttgttttcttttttctttttttttttttcaggataaaaggaagtaaggagatctcacaagagcgaagaaagtagaatatcagggaaatacatctttccacattttctgaagtatttgggaagaaagctgcaggcctttcttgtagagttagtattagagatctcctcagtaggcttactttatgctggacattgtaacaacaataatagcccatgtatatggggctggactagcctttcttcctggataaacagagcccaggtgctggttggtaacatgaaggctccgggcatgaggtttctgtggtttctttatctacttggctcactaacagggaaaaaaatattttaaacatataaaaaacaaaaaacccccaaacaaaagatgaactgctttgacatctgacatctttaactgttttggcaatctgttatatataaatacagtaatgtgctcctttggaggcataattgaaaaaaaaaaaagcagagaagcaaaactgcaatgatggagtaagaattgcctgtctggggcacagaaggtcctgatgagctgttcctaaatgtctaattcaatgagattgattatgttgtcttaagtagcatttgtctgtgtagaggtacatatgccgggagtcaccacttttggcctaaccccctgcctgcccctcttctggaccttagtttgagcccaaatgcctccctcccatatggcactgagaggaaagtatggccattctcattttttttttttttttttttttttttttttttttttttggagacagagtcccactgtgttttttggccggggggacctcaaactcacagcaggcttcctgtctcagccttctgagtgatgggatttcatgtgtgagccaccatgtctggcttataggtgtgaatttagcatccatagctgcctgtctctcctccttcaatgtttgtccttcctgctcttgaacttgggatttccagctgaagtgtgagcttggtgagacagagtgatgtctcttgtagggttatgccattagctcatagctaggaacagtagagcaatgggcatggaggcagctccctgcagctcatgcatggtatagcagggttgatggaagcctgtgtaatagtcatggtaggtactgggccacacactagaggataggaatcagaaagaatttcatgtgtgttcatgaggtgaagattttcatcagagtgcttataagtaatagtttgatacacgaagaggcaagttgtaaaataacccaaaatgtatggaataaatggaacattattgatattaaatctctctttgtaaaggtagacaatggaaacaattaatgacatatatattctttaaatttaaaagtctcatatataaaagccaggtgtaggttgtacatgtctgtaagcctcatgttttcagagtagaggtgggaagattaagattgtaaggctatctttggctctatagcatatttgaagcctgcttggcttacaaagagaccctgtttaaaaacacatccaaccaataaacctgaaaaacagagaggctggggagtagcccaggtgttagagttcttacctaggtgtatgaaacccaggggtcagtcccccgtactaagtaaaactagtcgaggtggtgactgtaatttcagtatgcaggaggtgggggcagcagggtcaggggtcnnnnnnnnnnnnnnnnnnnnnnnnnnnnngtgtgttagcctaggatatgtgaggccttgtttcctcacacaccccaagagtatggattttttaaagttaatttgaggttgaatcacgagttgccgtttcttgctccaatttatctattttgtgtattttcaccttgtgatataaagtgctgacttgtatggacaggagggtgactgtgtattgttgctctgtttcctagtacgcgctgcctctccagctggtcaatcaccagaccatgacgacgtggatggagatctttcggaccatcattgacaggatggtccctccggtatgtcagggctctgaggaaatcctgcaaatgttgactcactgtccagtctgctccctggaaaacaaaacaccactatcatagtaaccagtaaaaaagtgtaatacatgattagtaacgtttacagaaagtcagatcagcaagaatatgaaagcagtaactatgtttgacttaagctggtgaaacattttaaaccttgctacatatctctctagtctttttttcttggatgtgtatttagaattttacttctcaaaatagtacatgtagctgtaccttcatattttttcaccaaaaatgaaacatgaatattattaatacttttctggttataacttttttttttaaaattagtttttattttacatttaaattttttagtgagtgtgtatgtgtgtaggtggtatattgtatgggagtacccatggtgcatgtatagaggtccgaggacccttgtggttctttctttccaccatgtggatcttggggatcaggctgaggtcattcaggttggtagtaggtacctttacctactgaaccatcttgcctgcccttgactgttttttttttttttcaagatggggtttctctgtgtggcttgggagcctatcctggcactcgctctggagaccaggctggcctcaaactcacagagatcctcctgcctctgcctcctgagtgctgggattaaaggcgtgcgccaccaacgcccggctcgattgtttttatactgtcgttttaatagggtgcttcattgctagatatttgggtagttttcatgtttaagctattatctataagaatgtgatttagtgccttggtggggtgaactctgtggcagagtggttgcttcttgaaaaagtgttgggctttcaacagaccttgcaaagccgaaacaatgctcaagcatgtactttagtaaaccatggccgagagtgtttgctgcaagtgcacactgattctaaactacctgttttataggtaaaagtatcaaagtgtggctgtggtagcaacaatagtgctacgtttcacctgtcaaattaacctttgtattttaaaaacttgagttggcctgaaatgtccactattctttttgtgtccattccttttatttacttacatatttaggttgagcccaaggactctcacatgctaatcatagtgacatatcttctccattgttcatacatgaaacaaattatttcaagttttaatgtgtccacagttcagtgatttttgccaacagtcttgtttgtgttgactacatcaaaactcagaacttttctcatcctctcagagttctgtttctgcctacttgcttcccttgaagataagtacaaacaccagcactgcaaggaaagatttgcttaacttactgaattcttttttttttttttttattaactaacttacttcttaattagctacctgcaaagtagagtgtatattcacatagcaagtctcacttcgaatagctatggcttaatctataccaaaatttatgccatttttgtcaaccagcctaggaaaaaaaaatctgatctggatgtttttcccgtcttaggagactcttcaaattgatgaggatgaccgaccagagctggtgtggtggaagtgtaagaagtgggctctgcacattgctgcccgtctctttgagcggtattactcctcttactgtgttaatggcgttacagttggtatcttggtattgggtatactagaagtgagtggctccctgatgttctacagagtacgatttttgttttgttttgtctttaaagccatagagagcagctgggctgggcctaagtgacatatacgtctattctaagctgtagggaagtggagggaggagggtcatggatcgaaagtcattctcagctactcccaacagtgagttggaggccagggtgagctataggagaccctgtctcatacaactgaaaaccagaccaaaccaaaccaaaaacacccacaggtggcaaagctttaccagctgttcaaagtaggcttgtgcccactgccctagaaatcataacaaagtgggtaaccatctctgcctcttttctactctgtgcaaaaaacatggagaactttttatttttttccccaccagctatatacagaaagtatgtaaggtggcgcacatggatactcggctccataagaaagtcaaatttaattttaaaagcttttattgaaaaacatgtcaggcataatatttttattcctcctaggagttaattggtttagaaattagaaatttctgttcaaaatgttaactgtgctgcagacctatgaattcctcctgattcatattgtatcttgtggagaaagagaacatgctagttttctgggccagtggaagacatcttttaatatctgtgtttaaactagcaaggatgctgtgcttttaaacttcacagtacttagatgtttctttttcttgaattttaaggtatggaagcccgggaaatgtcacaaaagaatacttcgaattttctgaattttttttgaaaacctatgcagtaggaatccagcaggtaataaacttaatgcttttaaaatagagggatggttgttattgagtgctgcttctacctgttgcttgcttacatggtaattcgtcgcacactcacagatggggaaatggcagctgtgggaatctgacacagggcaaccagcttgagaacccaggggcctctatgacccctagacttgtgaggacacctcagatgatggtgtagacctctccgtgttcttaccagtttccagtttctctgagctttcccttgtctatttgaagatttatgcagtgtgaataatctatcccaacagcagtctagcttagatatcaatgaagactctcaggtaagaacatccacaagttcttggaggttggagtatccagtccacataaggaaaatgtggaactcaggagactgttgatgttaatatttaaaaactttaaaaattgcaaaggacagtgaactctgattggtccatcaaatattgccaactgagccgtgatatgtttgctatttatatttttaaaatgagagttagtaattagtaattagctgtgccagggcctgtatagggaagctaggactgcttaatcagacataatccaaggcttcagtgatgcagaaggtatttataggcttttcataaatcagtaatttgaaattaagtacttaagtaagatgtaacaatttctgaaaagtactttgatatggtacccatgagatactctgtaggggaagttaataaataataagtgaaattatctgtccagatattcagttgtctctctgactctgttctgccgctgttaaactccaagaagtgtcttaacattgatgcctcttgaaagtgtgtttagaattttctagtatcatttacacatgcatgtgtatacttgtattaaaaaacacatgctgtgtccatgtgtttttgccagaaatgttacccaagacatatactcttgatattgaaaattagtttcctggccagagatgtcatctgctgctgtcttcagtctcctctattgctgtggtgaggaccagcctgcatcggctcagggatagagtggcatccaatggggtcagcggactaatacctcaacttgacttttctatctgagggagtaaaacttaactctctggggctggcaaaaaagagaaacacacacacatgcacgcacgcacatacatacatacacagacacacgtcttaaacatgtcaggatctcacatagggtgctgatgaatggcaagccttcagcaggtcagagaaactgaagaggagatgcagagtagagtggacagacaaacagacacacaggacttttctaggccaaagtttcttcattttatcattcttactgttgtttgttctactctattccttttctgttctgtttttccaccctgatgttttccttctctcttgaagtcttccttctagcttttcttttacatctttcctggtgttttccttctctcgtgtttttatttttccctcttagagcttatatacataccccagtagaatctttcaagcaatgtaaaaggtacaatgtggttacatactgtttttcaagtgagtgattacagtacaagtaaaaaacagcatgtttttttatatcccttacatgtttaaacaatttacgtaccacaggtgaaaaaacaagtcatcccaagaaactgcatactttcatgtccaagcaacttgttatagattaacagagtgtactcaagcaaggtgttcttctcagccagttgtttttgctggcaggcttcattttgtggtttcaaagaaaggaccagttattttattatttgtttcagaaggcaatcttataagaaacatcttaaaggaatcacaactctaaacttttatatatgataaacagtcagttctactttaaatccccagggtgcacacccacttaccagtagtttttatatcaggaagctgagggcagaaatgggtatagcaagaaaggtacatgagccagcaatagccaggctgtctttgttcttgtttcctgacctcaacgagtccctcgctcagctattaaaaataatgcctttaaattgttttccgccaggcgttggtggcgcacacctttaatcccagcactcgggaggcagaggcaggcagatctctgtgagttcgagaccagcctggtttacaagagctatttccaggacagcctccaaacccacagagaaaccctgtcttgaaaaaacaaaaaacaaaaaaacaaaacaaaacaaagaaaatgttttccaagggttttttttttttttttttaacctcaaagccattaacaaaaacatcttagtttaaccttacgttatttttaaagttttgtttatcgatgatgcacactgaaacctgtgaacacatctcccaacattaagatttaaagaacttgagttagcctagtttctgggacgcagttgttttccttaatcattaacctaagccacagtctatacggctcctcaagaaaaactagctgtgtgacatttccatgttctaattttctgtcctttgtagtccctgctttatcagggacaggggcaaggacagcacaatatcttgttttttacctgtattagttttcccactaagctaacctttatcataatcccttactatatttgttaaagaccctcaatcatcaaaatcttatttaaattaacactattattatatataatcattgcttcaattaagcagtacagcttaagaggaaaccatcttcataataatacacaggtaaaaatgcccagtagaatgggatagtcccatgagataatcccactacatttaaggcagtgaagatctccccagacccattcaaaccatgccagataccagagaaaaatggcagtggcaagagacacagcagtagcaagagacattctgggactgagtctctcaggtcctagcctacccaagattcacccatcagtgccttgcatgctggtgggttgatcccctgaagttagttgccacctgctgctcctctgacttggccaccatacttgtttgaaccccagtagtgtcaggacagccctgggcaatatcatcctctcagctgccactgcgagagtttctaggtggtagctggacttcagaccaattttattaacctagattttaggtaagttggataaaattcatattctaatttataaattttgtatatgttttgaaagatttagcaactcactttaagcttgacacaatgaagtgatggggaccaagaaatgggaggcattgtgctgtctctaaaggcccttgagtcagtcacagccacttttcaaggttctttcttataaacaagaatgtaaatcagcccataagaaaagtccaattttgtcttatgttacagaggttgtcttcggcctgacattataaaatacacatatcctacattttcttctaggaactccatactgttaaagtatttatctttctggagtttattttggtgtgaaggttagttggggatctagtttaattatttcatagaataattggttatatcagcactatttttataataatgtttatcttctgattaaggtctaagtgttggtgctgctggtactgtgtgaacttgtgatgctgtgtgattatatagaagttttgaaatgtttatttgctcagtcagatctgtaattttattgaaaataggagaagctagctgtcttagtcaaagttctattgttgtgaagaggcaacatgaccatggcaactcttataaaggaaagcatttagttgggcaggcttacagttcagagggttagtccattatcttcatggcaggaagcatggtggcatgcaggcagacatagtgctggagaagtagctgagagttctacatctggattggtaggcagcaggaagagatagtgacactgggcctgccttgagcatctgaaacctcagagcccacccccactatcttctatcttatttcctccaacaaggccacatctactccaacaaggccacacctcctaatagtgccacacccgtgagcctggggggggggaagggggcattttcattcaaaccagcacaccagccatggactagaaccatagacttattctgagtagcatataggttagaagaacaaatgcctaaaagtcagcgagattatctcttagctcagtgaaacacacagaccatctaaaagatgaaacatgatctgcatgagctttctcagcatctcccccaaatctgcttgtgtagatcactgtctctacagcattgtatgtcatgtctcaagcactcctttgctctttaatgtagtaattgttctatgtttgtcctcccaatccctcctgttttcctgtaggtactactaaaaattttagaccaatacagacggaaagaatatatagccccccgtgttcttcagcaagcattcaactatctcaaccaaggggttgtccacgctgtgacttggaagcagctgaagccacacatacaggtcagcgttggtcccggctctctccaccatggtcggttaagttgggttttgctagagagagcaggtgttgttccctcctatgtcttctactgaatctctgttccccactaacaatagttactaacaagtgctgtcttatgatgaagggcttccaacgtgtgaacatttgagaagagagagattgtgagttgggaggcttggagtcaggtgtcagtcattttatttagcctcagtgtctgttctgctaaggcagatcatgatgttttcttgacccttgtgtgaaaacattttgaaagctgccagcagtactttacaaagggagtgttattttgcagaggatgaagtctgatcgacgacgacttttcttttgtggatatgtgccagaaggccagtctgcctccctgcctccctccctccctctctctccctctctgtctctctctgtctctctctctctctttcttggattcagttctttagcataagtggaagttttgtttatttttttaaaaaaactttatttattatgtatacagttatctgcatgcatgcttgcacaccaggtctcattacagatggttgtgagccaccatgtggttgctgggaattgaactcgggtcctctggaagagcagtcagtttaagtgctcttaacctctgagccatctctccagccccccgtagttttgttttattaaaaacagctttatttttattattttttaaaaagttctattaaaacttatcaatggctgtttttaatgccaactttttttgttgttgttttaaaagacagaattgttatttgtcataattaaagagcaaatcagaatggaaaatgatggaccaataatgtacacattttatttgtacataaatatctgggtaacttaaagacatttagaactgaccctccacttgcaataaactgtgagttcttggcgtcaaacttttttttttttttccttttgagacaagaccaggctggctttgaactcagagagatctacctgtttctgccacctgagtgctgggatgaactcatgggccaccaagccaggtttataatattttttttttttttggtcttttgagacagtagcccagactgacattgaacttcctgtgtggtgggcgatgaacttgagcttctggtcctcttgcctctatctcctaagggttgagactgcaggcatgcacctctgcccctgcctgtctggtttatggggtgatgaggattgaactaagggcttcgggaacctcatgcatgctaggcaagtgctccgtcaaactaagctacattcctagccccttgttcttaaatcctgtaagttggtatgtgacaagaaaaatcagttgctttacctttcatggtatctatgatagagtttaggtagtattacctttttttaaacagtgtcttgctgtatcgtttggccttgaccctcaccatttttcttcttccactttctgaatgctagaattatatttactgccacactcagctttggttagcattatctgaacacaagtcttacacatataagactttctaaaaaataatttaactttattatgtgcattgattagtatgagagtgtcagatcacctggaacaggagttgcagacagttgtgagctgatacgtaggttctgggaattgaacccaggtcctctggaagagcagccagtgttcttgaaccactgagccatctctccagctctgtgcattagcttttaaatttgtgaattatggattctttataactgttttcctactatgaccaaaaagtggtaatttctttgcaattagtaaagattttgttttcattttatttactttgtacctgtaaatgtaaggctgacatgaaatactaaatagcatctttccctttggccttacttttttatttaaattctttaattactactcatttacatatccatctcccccattcccttgccctcccatcctcccatgttccccaccaaccctcccaccagggaacttcaaagtctgtcatatcatttgggggagggcctaagccctccttgctgtatctgggctgcaatagtatccctccatagagaatgggctcccaaagtccatttgtgctctagggttaaagactggctctactgttggaggtcccatagactgtcttggcctcctagctggcacccacattcagaaggcttggtttggtccaatgctgtttccccagctttatgactagggtctccatgctctcactaggtcaggtcaactgtttctgcgggtttctgcagcaccgtcttggcttctttgctcatctctcctccctctccacaattgaaatccaggagtatgattcagtgcttagctataggttcctgtttctgcttcgaacagctactggatgaaggctctaggaatggtaaccaaggtacatatcaatctcataggggaagggcatcaatggcatcctctccaccactgcctggattcttagttggggtcatccctgtgtctccctctatcaaggcatctcctttcttgccctcctctagtcctcccctgtctcaggcctcttgatctcctccccttctccccttctccccttcccatctccttcctgccccccccctcgctcccacttcgttcaggggtttttgtccccctccccttctttgagggactatgcaatcttctcttggggtcnnnnnnnnnnnnnnnnnnnnnnnnnnnnnnnnnnnnnnnnnnnnnnnnnnnnnnnnnnnnnnnnnnnnnnnnnnnnnnnnnnnnnnnnnnnnnnnnnnnnnnnnnnnnnnnnnnnnnnnnnnnnnnnnnnnnnnnnnnnnnnnnnnnnnnnnnnnnnnnnnnnnnnnnnnnnnnnnnnnnnnnnnnnnnnnnnnnnnnnnnnnnnnnnnnnnnnnnnnnnnnnnnnnnnnnnnnnnnnnnnnnnnnnnnnnnnnnnnnnnnnnnnnnnnnnnnnnnnnnnnnnnnnnnnnnnnnnnnnnntcctttctccacatcctctccaccatagactgtcattgtgtttttgattttagccgttctgataggagtaagatggtatctcagagtggttttgagctgcatttccctgatggctaaggatgttgagccactttctcaagtgtctttcagccattttagattcctcagttgagaattctctatttagttctgtactccactttttaattggattatttggggttttggtggctatcttcttgagttcattatatattttggtgatcagccgtctgtcagatgtggggttgttgaatatcttttcccattctgtggactggtgttttgtcttgctgactgttgtctttatttttagtttttttattttttatatatttgaattacaaacaagattgaattacatgacaatcccagttcccaaggtgaggtcaggatgactcgggatgggctcttaaggggccttgagcacatgggaggccccttctctctggcctccctgccttgcgctcctggtacgctctggcttgcgtttggctgatgtttatctgaataaagataacttaaacctacaggttcttgctatattggtttttctgttgttgaacgtggtcttattctgtcatattcccatcccttcttccagtgggtgcacgtggggtctctccccctctcagaaggcaggaggagggcagagggcggagggttgataaggttgagatgtgtttggactcagggtgggccttcctgtctgggcaggtccactcttgtccgggggaggctcaggaagaatcaagcagggagtgatgggataggttgggggccctttggccttatttttacatagcttttgcataaaaactttcaggaaaatactgacatttaggccgaagttcaactaagtgataagaaatggtcccccccccttttttttttaaagatttgttttcattttgcatgtatgggtgttatgccgcatgcttgtctgtgaactgtgtgcatgcctggtgcccaaagaggccagaaagtctttggatgccttagaactggagttagatggttaagagcttccatgtgggtgttgggaatagaacccaggtcctctggaatatcgccgagccatccccttagccccggtcctatttttatgcgagagttaccagaacacacagggcctgctttagcttagctgctgttcagaggctgcttaggaaacttcctgtctgaaacacacagctgtggagtagagtactggtgttttgaaaatggaagcagagaagacacaaatattgttgatgttttgatgctttggaccaacatggacacatgaaatattttcaacatgagaactataatagtaaatataatcctggtggcatttttcttcacaagatatcacggtgtgtttaaagttgacctgtcagtgaagttctgtctgttgttcctgtcctcacttcagggagcgtcacttctctgcttctagcctccaactcctaagtgttcagtcagttcgagtctcagctattgtcctctctggatgtgaatgcaggctgagaaggttcactgtaactctggggaaaactaatatcgggagtcttgtcgggatggcctgtccccaactcttttgtttgtttctcaccttagaacatctctgaagatgtgattttctctgtgatgtgttacaaagatgaggatgaagagctgtggcaagaagatccatatgaatacataaggatgaagtttggtaattgaattttccctcagcactttctggatatataaatacgactaatttgctctgtctggtgaactcagaaattcagaaaagtctcatgttattttgcaccaaggtgcttgatgccctggggtgccagagacacaagaagccttatccatctcttgcggcagagctaaggcccttgccgaatggtttgggtccctgcccatgtcagaagcacctcaggcttgatttgctttctccttccttgggccacgcattccaccagggatagtatttccctcaccaactaatagtttctttttggtggctttttccagacagggttcctctgtgaaactgtcctggttgtcctggaacttgctttgtagaccaggctggcctggaactcactgagatccacctgtctctgcctcctgagtgctgggatcaaagtcgtgcaccaccaccatctggtttaattctggcatctttacgttataatacaataataaacaaaaccctttcgtgtttgctctcagcttgtttgctatagtgactatttacaaacttcatcaactggggctggagagatggctagcaattaagagaactggctgctctcccagagaatccagatttggtttccagcacccacaaggtggctcagatacctgagctatattgcttttctttaatcttaccacttgaaaggttgagcacatggtgtttgctaaacattaaatcataaattagattgtgcatgaaaactctgggaccatgacatctttattgtgtaatccactggccaggtttaaagtttgcataataaagagtttattttttattaataagatttattttgacattttagatatttttgaagattatgcttctcccaccactgcagcccaagcccttttgtacacagctgcgaagaagaggaaagaggtacccagtggatggaaatgaaaagtagctaatgttgctttgacgttctgatatgccctcagtatttaacagttcatatcattacctatagcctatcactttaaataggttttttttttttttttttttacaagtaaaaggtcgaagtatctttgacacctttctcatcttgagctcatagttgatgaataaagcacagtaaaatggctttaattttgaaaattaaatttgaaaatgtgtgtcatatttaacgtggtgttgacaagatggagactggtgcggactgaaatggattcttctgtttctttaggtgttgccaaaaatgatggcgttctgttaccagatactaacagacccgaactttgaccctaggaagaaagatggagccctgcatgtgattggttccttggctgagattttgttgaaggttaagacttatcaatctcctttttttttcatatgttagagggtatttgtgtagtgtatgtgtgatagtgtgtgtgttcatgtgtatacacacacatggtttagaggccagagtaagctgtctgtatgtatggctctccactattcatttttgttattttactttatatgtatgatgggtatttgtctgcatgtgtctctgtgtactgtgtactgtgtactctgtgtacagtgcatgcctggtgcctgaagaagcgaggggaagatgtcagattcgctggaggttatgaggtaccaaatgagtagtgggactgaacctgggtcctttggaagagtagccagtgctcttaactgctgagctatctctctagctgctatgtatttgttctcattagcttggaacttaccaagtactagactgtggccattgagctttggggatctgcctgttgctgccctccccatcacccccacgcttggatcacagatatgcactggtacaccattactcctggccccgcttgggaatctcagctcagggcctcatgcttgtgtggcggacatgtcgccaaatgagccgttttcccagctcagatgatcaagacttgactttaagctgtgaattggctcaagccaaccaaagcttgaaaattcttggtgactaattctaattgattggctttaatgtaaatatcctttcctttataacctacatacgttttttaaaaatatacatttcttattttatgtttgggttttaaaagtatctttattatctttttttccaatgtaacatttttattgattatttgggaatttcacgtcatgtaccccaatcacactcacttcccagtcctcccaagtctactccccacccttttgacctctctccccccaacagaagaaggaaaagctttcatcactatattttattcacttactttgagtgtgtgtgcatgtccctttgcgtgtgtgccccaccacacagggatggagttcggaggacaacctgtggggttgggagtcagttctctcctgtctccctgtgcatcctggggatcaaaatcaggtgattagcttggtggcagcatctttatttgctgagccatctcaccagctctgtcacttactttcttagctaaaaagaaaatttacttttgccagtttaccagtttgaaactatagctctgtaagaaagatctgaaatgattttagtataattccttctatctacaaaaaccaactaatataaaaattgttctaagatactattcctgagtaagatactattttaacgatgtgatgtgtggatcaaacaatcttacaaaattgggtatgaaatgcaagtcatcataagcacactttttgggaagtggctctcccatatggtggcatcattggccgctaaaattggctttctgttctttcttaacagaagagtttattcaaggaccaaattgaactctttctacagaatcatgtgtttccattattattgtctaacctgggatatcttcgagctagagtaagttttccttacctctgttacgcatcttaagatctcacctgtagggtagtttctgaagtgaatgtgatgatttggttaaaaactttccatgtgtgacattgtcacagggtgctgtcataccatggttgctccttgacactcacagaccgctcttctcccagtcactgtcccctgacactgtcacacagcactgccatcccagtcactgtcccctgacactgtcacacagcactgccatcccagtcactgtcccctgacactgtcacacagcactgccatcccagtcactgtcccctgacactgtcacacagcactgccatcccagtcactgtcccctgacactgtcacacagcactgccatcccacagtcaccgtcccttgacactcacacagcactgtcatcccagtcaccgtcccctgacactgtcacacagcactgtcatcacagtcaccgtcccttgacactcacacagcactgtcatcccagtcaccgtcccctgacactgtcacacagcactgccatcccagtcactgtcccctgacactgtcacacatcactgtcatcagtcactgtcccctgacactgtcacacagcactgtcatcagtcactacatctcagtcaccgtcccctgacactgtcacacagcactgtcatcccagtcaccgtcccctgacactgtcacaccacactgacatcacagtcactgtcccctgacactgtcacaccacactgacatcacagtcactgtcccctgacactgtcacaccacactgacatcacagtcactgtcccctgacactgtcacaccacactgacatcacagtcactgtcccctgacactgtcacaccacactgacatcacagtcactgtcccctgacactgtcacacagcactgtcatcccagtcaccgtcccctgacactgtcacacagcattgtcatcacagtcactgtccccatctctcattgcagtcctgctgggtgctgcatgcatttagttccctgaaatttcataacgagctcaacctcagaaatgcagttgaattagcgaagaaaagcctgattgaagacgaggagatgcccgtcaaggtggaagctgccctggcgctgcagtcactgatctctaaccagactcaaggtgattcccatgggtcttacttttttttttcaataaatggcctaaaataatctcatccacttccttccttaaaggaggagatttctagtcccaagggcccagagtttagattccttgcctgcttctgaattttgtaggcactttctttgcctatttagcagctctgttgtggtttccagttaataattgctgggtactgagctgggccttaagacacctggaccagctttggtgctctctgactggccacatgaagcaggaaaggcatccagtttcctgtctgaagcttacaaagctgacgaggctctgaccctgtcagccttcatttcctcctgcctcagttcaaggagtaagattgggcagcaccaagattccactccagggtctctgtggttctaccagttcagaaagtagtgagtggtatttccagtgggcagtgacacaggtgttttgtttgtttgttcaagatccaaacagcctctgcaagtaaattcagctttacgagaacatgagcttgtgtcctgtcttgttgggaagattggatgaggtgtaaacatgtgctggggttgggttgggtagaggtgggtagaggtgggtagagacgggcaggacaggggcaggggggggcggccgtgggcaggagttctcacactggtcatggggacccacagtcaggctgacgacacgtttgtgtaattggaatttctcagggtgaggatacagagctgttggcctttggggtaggacagctcttccccaccctgatgctgtgtggcctcaggaggtctttactcaatacagctttgggacttgctcagcacagcacagcacagcagcatctagaaccttatctaggagtcagagtgtgtgagttcccaactcttgctgtgtcatttatctgcctgcattagccaaggagcacatgagaccacatgtgaggcccatcatgcaggagctgctgcacattgtcagggagacggagaatgatgatgtcaccaacgtcgtccagaagatgatatgtgagtacagtcaggaggtggcctccatcgctgtcgacacaacccagcacttggtaagtgttggaggacttccactggggaggctgaacaagcctctgttcactccaaatagggcactggtgacagactaaagaaatgatcctattcaaatctagcttggtgaaccagtgagcttattggggtgactcacaggagagtgtcactcacaaggcaactgcatccctgaaaagcctgttcgtacatgggcaactatgaaaactgcatccctgaagcctccctgcgtaactttgaggcaactcactctctccccagcacttgctgtctttataatttggagaggagccttgtgaatcttaagaactttctgaattccctttgtgaaccttcttaagttttgtttgcttcctgagtcttataaaccttcctcttcccttccactctctttacgaagaaatatttgcaaagcaacagtaagaatgacctaagtgtgtactagttttgtaaagaacccacatgccagctcacaactgtctgtaattccagttccagtggatctcataccttcttctgacctccacggcatcagccatgtgtgtggtatatagacatatatgcaagcaaaacacctacacacatttaaaaacaaaacaaaacaaaaaaacagccccaaggaatctaaataatgcccctcccccaataaattaaacttcagaatttggaattgagttttatttatttataaacaatcttaatatgaaagtatttgccttagtgattaagatgttcctgaggttgggttgattagccttaaatcaaccccattcaagacagtccctttcacctgtaaaatcctgaaatgccataataacactcttgatgtgagctaccttaactcttccttttgcacttggaattggaatttcaattcccctctttggaaaatttaaaagttatttctattgtttatgtacatggtgttgtgtgtgtgatgcagaatgtggaggttagaggaaaactctgtagagttggttttctccttccacctttatgtgtgttctgaggattgaactcctgtcaccaacctggtgtaacaagtgcctttttccaaataaccatcttgccagtccaggagaatgttttttgctgcctctttgataaaaatgttcctattgtcttctcccctcttctgtacttcttaatgcagacaatcagactggaactgagtcccactctcatgccttttctcctctttttgtctgtgtctttgtttaatctctgagtgatctttgatttcatcttctaaatgttctgtcacatcttttcttttagacatactggttttcagtgtttctagatttcgatttcgtctaaagataactagaagttaagtaaatattagtccatggttataatagctactatgtgtctcatgtcagtgactacaatgagtgcagagggatgttcatataagtgttgacatgatctgtcattgcaagaaaaaaggcgattcagtcaccaaagtgttagaacttagtgtctgagaaacattagcatctgggtgtacaacactgcccctccaccatggtgcaatggtaccagccagtgagtgttctaatgtcatttttacaggctgagatatttggtaaagttcttcaaagtgatgagtatgaagaagtcgaagacaaaactgtcatggctatgggaattttacatactatcgacaccatcttaacagttgtggaagatcaccatgaggtgggattccttgtgttttattatatggttatattaaccgaaatttatatgaccagtggttatgaattctagtctttttagtttgggggtgtgtatgtgcgctagccatggcatgtgtgcggaagtcagaggacagctcttaggagtctgtttgcaaatgtttttttgccctttattttttaaatttatgtatttgttgtgtttatattgactgtatgtgcacatgtgtgggggtgccattagaggccagaagaggacattggatttcctggagttggagttataggcagttgtgggccacctgacctgggtgctgggatacaaacccaggtcctctgaaagagcagcaagcacccttaaccactgagctatctctccagcactgtgacccgtgattctacctccttatctgtatcaccatcctcaagatttggtattaaagatttatgtttagttatattggtaaattttaaaaattgttctcacttcagcatttatgcaggaagatttcaagtccgtggccagcctgggctaggtagtgaaatcctttctccaaacacacagacaaataaattgaatttctctcaaactttaaagtcatgtgttaagatgatcgaggaggggagtttcacatttattgaaagtaatcgatataagcctttgtattgatctgagtccaggtcctcgtatctactgtgtgccaggctgggtttctgtgacttccagatagaatagaataagggacttgccttctagaaacccaccgtctaatcttagtggggaaggtgcagtaagaatggagaggtaaacaagaacttgacatccaaatcctagaggaacaccgagtgatagaattaactgtttgagacagggtgtcatgtcacccaggctgaccccaaacttactctgtagccttcaactcttgatcctcctgtcctacctttccccttatgttgggacaaaacaggtatatatcatcagatgctttttatgcagtgctgggggatggaacccaggtctttctgcctgccaggcaatcactccaactgagtcagtcacatcaaaggcccaggggtaagagtttggactttctgttcagtgctcaccccttagctggcggaagaatgccgataggtaatggagtctcctttgcagagacagaaatgtttagggttattgtacctggtcacaataaccagttataactagttataacgtataactagttttaggtctagatttgtcactgggccactcttgtcacacattggcttttccaacccacagtccccctgggttctcctttccaaggggaacatggcctttccttagtgaagattagcagtgtgtttgttgcatctgtgaacacaggctgcttgtgttggcaatgacgtcagatctgctcagtcagcgagggtttggaagcaggtaccagctcttttacagtgtgctgttagccatgtgactacaggttcatccgtttgtaaggcaatcaagggatattgcagtgttactctgagtagggcaacattactccactggaccctcctgcgacttagggctttatgtgagcttcaacttccatattcgttttatttttgtgtttccatgttgactctggtcttcttggtaacagcgagtatagtccaaattaacttagaatagctatactttaagctaactatacttctttcaccttgtattttcaatttcatgagacctgagaaatcactaaattcagtttccccaagtatgggtatggtgaggagagcaaactgcagggttattttggaaacaatggcattttgccttttgcttaatcttttttgatcttgatatgaattgttttgaacttcaactaatgttgagcattcagagttaaccataattatcaaaggagacatgagttaaagttgagacacactaagaaaatcacatctggcttcctgtctagagatgaaaatgtaaaaccttcagcacaattagaggcaaacctgcctgagatctggcacacctggctgccatctggcctcctggtcacctgttcttacttagctcttttgaagcttataatatataatcacaccatttctctcttccctttcctccctccaaaccctcccacaaacccccatttttactccttttcacatttatggcctctttcttccttgttacataaatatatgtgtattttagttacagatgtgtgcgtgtgtctacatgtgggtatgtgcacatgttcatggatgcccctggaaggtgcattgtctacccaggagctggagttactacaggtagttgtgcactgcttgacatctgtgctgtgaactgaactagttataacctgtaactagttacaggtctagatcttgtcacacatgagattttccaacccactcttaactgctgagatatctctcctgccccattcattaactttgaacttcactcagtgaaagtgaactctggaagccatacttctttcagagaaaaacataccaatggttacttagaaagggcaaaattggaaatctgaaaataggtactcaagcaggttcatttttatctgatgttttaaggatatcaatagagtctagcttttggatcatttgaacttcaaaataatagtttaacatttatcaagttatcaaactgtacctacaaatgattatttcagttaaataagaaatgtccaaaataaaattaaaattgcatattagaatatgttctaaggttgaattatactttgacacgaaagtgtatctcactactgactttaaattttattcatttataaaacacctgatacaaaagccaggaatactgttgtacaactttaattccagcacttgggaggcagaggcaggcagatctctatgagttcaaggccagtctggtctacagagtgagttctaggaacagccagagatgcatagtgagaccctgtcttggggcaaaaaagaacctgatacggcagttagtctctgaagaaaaggcaggaaggtgtatctctgaatttgaggctagcctggtctactatagtagatctcctgtgtagatagtgagttctaggtcagccaggctatacaatgagactgtctgcatgtattgaatattgaataattgaaatcatgaagatatacttaattaaactcactgtttattgggttcttcagttaacccagttctcttcccagagtggtagttttcatcaggtgtatttatttatttatttatttatttatttatttatttatttgtttttgccacactagtaaaaagtgagtgcacgtatatgtctttcatgaagatgatcatgaggattttgctaaaattccttccctgggggaggagtgtgaaccacatccacctccctcaatctaaggtccctttgacaaaccagagtttgtacccgggagaatcatttagtttattgggcttacaatgcatgttgcacttttacactgtgtataaagatgtgtcattgtgactggtgaatggccagtagctcggcaggaagaggttaggtggaacttctggggacagagaggactctaggaagaagaaaggtggagatgccaggaaatgcagcataagcaggatgtgcagggggagaagtaacagccatgagccacgtgtcagaacgtggattaatgtaaatgggttaatttaagttaaaagaaatagaaacaaccccaagctataggccaaactttcatagttaataagaagtctcttgtgactttatttgggagctggcaagacagagaaaaaaagacatgttacaattgtgggtgagcctcaagtagctgcactgggatgtcttcacagcatggatgttggcttcctcacaaacagaggtcctctgcagttacccctccccctacttcagcctatatactttagcccctccccaagtccccaaagccatatgcatttagggcagaattgaatatttatgactggaaggattctcaagtttgggtccagtgattctcgtcataccctccttgtatgaggaatgtcagtagttgacaggccttctcctgatggactcttgactcttgtaggcagtcacggctgacctgatgacgatggcataacaacattatactgttgttttaactgacaaattttacttaatgtatcctgtgattcttccgtatcagtcagtaagcatatagttttaaaaatattctcttgtatgtatatcacatttacagccagtctgcagtgagtagacaccgtcatttggttgttacagtcacagatactgttgcactgaatggccttatccatgtcctgtagctggagtgaggagtgtctgtgggtgaattccttgaggagatattgttggctgagattacattctggtgtgtaatccccagatgagagctcccgtcttcctaccctcacttctgacacaacctcagtgtcatatccagtcatgtgtgacagtgaccatctctttatgaccctgagacacttttgtttgtttgtttgttaagtaggtttagctgtttttctgtcagatttttctgttagatttcaagtataaggggaatttggtgttgtttgtgataccacttgacaatattccagtccatttgccatctgtcttgatctgttcctgcccttgtacacaagttcttgatagttttgcagtcaggtggtttcttattttggttgtgactttctttacttccttatggttacatagggattcttttactttttctggtatttttgtgttatagttttattacatagaaatcattgatccattagaaattcatttagtgtagaatatgaggtaaggaagtatctaattctaattttccatggatttaactccccttcctatcattggtctcctttcagaattttcttgtatttttgcatatttaattttcacatgaagattacagcttctcctctcagaaatagctgtagatatttcactgggataatattaatttgtatgataaccttagaatactcacagtgaattttagactctataaaatttgtctttagatcatacagcagttggagaacatctgtctgagaatcatcgatcttgttttacagaagcgtgtcattggtaagttcagatcaaaggtaaactgagatttctttttccatttgatgaattcaaaagtacatttttgtagctctttaaacttagtgaggtacacagttttgagagaggagagcttgctttccttaaatttgaggctcagctttctgatattagctaggtatattttcattcagtggtgaactcttaatgtgtccagagaagaatttttggtttaaggaaatttaaagaatggagaatgtaatacctacatctcaagcagagctgggccgagaggtcagttggtggagggcttgcctggcaggcaggaagccctgggatttgttcccagcaccaacatacactgacatggtgactgttgcctgaattctcagcacttctcaggtggaggaaggaagatcagaaggtgactttgaggccagcctgggctatttgagatccgagtgtggaggcgtggagaagaaaaagtggcagagggagagagggagaaggaaagagggggaggatggggagaagtagggaggggtgaagtttatctgggacttgtaaagtgcacaaaactagacaaatgttttagtatgaattagcagaaaagctttgagtttccaaggtatgtactagctgctttcatgagaaaaggcagagcttagaagttagatgtctttgctcagagataagagctatgtgttttctggtgggatatttagatatggtttcctccctccccccctccctcctctttctttctttctttctttcatttttttgagactcccgagtgctgggattaaaagtgtgatccaccaccacctggcagatatggttttcttttgactgagagtagtgaatgtgtgtatgaatacagaacatttctttgggcctctttacttatagtggtataaagtattgtaaagtaaactaaagaatactgctcaaactataagctctataacttgaagaaaatgttatatcttttatagttgttggtaaaactataagtgagatagtaatacatattatctctgtatcattaagctatctagagatattactaatggtttatacattttgaatctacatgatagaagtatgctaatatagttctcctacacatttacaatataaagttatagatagaaattttattttctgttataaaatagaaatttgatttttttgttgttgtttgtttgtttttttgagtccggatctcactatatagtgctgactgtcctggaactcactctgtagaccaggctggcctccagagatccacctgcctctgcctctgcctcctgagtgctgagattaaaggtgtataccactatgcctggctgaaatttgattttttttttccctctacaagatttcaccatgctgccttggcttttcctggaacttgccacgtataccaggctagccttgagcttagagatctgctcgctgctgcctccagaatgctggaattaaaggccagtgcccctgcacatggcctaaaatagaaactttaagtttttttttctttcagtactatgagaagaccattgccttgtgttgttgagcagagggttgatcttagttaagagctgaaggcagcctctctggctgatgccaccgaggaaggtgttcaggaaatcccgtggcacatgggagggatgtgctttagtcctctatgtgatccctttaatctttctgttccctcacattctaactaaagtgtttttccttctagaattctatgaagaaatcctttccctggccttcatcttaacctgccatgccatctccccgcagatgtggcatctcctgggcattttatatgaaattttccagcaggttttctctgagtacttcacaggcatgcaatgatcatactacagtttttctttctttctagacaccctcagtactaatcagatgttttaattttactgtccaggaaatggggacagtgattataccagtgtctcagcccttaggataggcaaaggaagttttgtttgtctcctttcttatgttagtttgcaaccagagcatgtagccatttgttaattgagtaaatattttctgagcacagccatgtcctaagcactgttcttagcccagcaatccagcaggggacagcttcagccctttgctagttttcatcctggtggggggtgataacaaaggtgcactaaagccagccaatgagagccttggcagtgtgtcaggcactaaaaccagccaatgagagccttggcagtgtgtcgggcactaaagccagccaatgagagccttggctgtgtgtcaggtaccaaaaccagccaatgagagccttggcagtgtgtcaggtactaaagctaatcaatgagagccttggctgtgtgtcaggtatcaaaaccagccaatgagagccttggcagtgtgtcaggtactaaagctaatcaatgagagccttggctgtgtgtcaggtatcaaaaccagccaatgagagccttggcagtgtgtcaggtactaaagctaaccaatgagagccttggctgtgtgccaggtagtgctgagtgcagtgagagagaggaaaggtcagaagtactctgataaacagtgagcattttaaccttccacatctgcattccctttagtcataaatagagtgggtatatgtagggagacactgtaaccacgcctcctaagggctggctacagatgtgcctgaccacgcctatcaaggcgtagtcaagatgaggtcagagtgaccacggcatgggctcttaagcaacctcaagcacatggaacagtttcttccccttcggctgccccttctccctggcctccctgccttgctgcccctgagcaccctctggcttgcctttggctggtatttatctgaataaaggtatcttgaatctacaagcatttcccttcaggtatatcgtgtcctttttagtttttggctgctaagggagacagtatttgagtgctagagaagtgtggttccaatgggaatcattcatttctgctcctgttgcacgagtctcagtgagattctggatctttcccaagacatgatgcccctcctgcataattatgtgacagtagacaccaacgcgttgctgtcaaatccaaagcacttagaagtcttgttcactatgtgcaggaaggtaagtgcaccctgtcagttgtcatgtgattctccgtaatgtttgggtgtttagtttatattactttatctgaatagatttatcagcttcattttaaaagtgagtttgtgattgttgtaattttaaagtttcacagtatgtgttgtacttatgtcacttcaatatctatgtactttgaaattttttaaaaagatatatttattatgcatgcatgtatgtctgcaggccagaagaggggaccagatctcattacagatggttgtgagccaccatgtagtttctgggaattgaactcaggacctctggaagagcagccagtgctctcaacctctgagccatctctacagccccatacttactttgaaattttaagtaaatacagctatttgtctgtatccatggagacccttccaggacccctatggatatcagaccccatgaatcctcctgtctcataactaacaagtatggtctttgcgcatagccagcatacatctcaccatgaacccaacccacttttataataacatccagtacaatatagtgttatataaatagttgttaaaccgtgtgggtcagaggtagagacaagaaaaagaatctgcacacatttagtatagatccaagttttaagaaaacatctgacttatggttggtggaatctgtggacagagaacctgtgcatatggagggtcagctcgctacttttctttccattttttttttcctttcaaaaataaaaacttaatggtagctggagaggtggctcagtggctaagagcactcaggttcagttctcagctcccatatggtggctcacaaccatctgactccaggtccagggaatttggatacccttttctggcctctgtaggcaccagacatgtacttgatacacatatataaatggaagcaagacccttacacaaatacaattaaaaagaaaatttaaaaacataaacttgttataattaaagtgctgggaaaactaaccatacagtttgtcagtctgtgacagaatggtatctgtctttttacttttaattgattgtgtattggaagctacctatgtgcctagatacaggtaattttaacataagcaacataaaacaatggtaagagttacagaagcaatactttgttcagtatgtgatgatttattgttgcatttatgcagacatgattttccattatgttatcttaatcctctattggttatatcttaagaatgttttgatgactaggtcatgttacctacttcaggtaagtgtgtgtgtgtgtgtgtgtgtgtgtgtgtgtgtgtgtatgtgtatgtgtgtttgtgtatgtcgtatgtgtgttcgtgtatgtgtgtgtgtttgtgtttgtatgtgtgttttcgtgtgatattatgtgtgtgtgtgtgtgtgtttgtgtgtgtgtgcttgtttgcatgcgtgtgagtgtttgagtgtttgtgtatatgtttgcgtgtgtgtgtatgtgtgtgtgcttgtatttgtgtgtttatgtgtatgtatctttgtatatgtgtttgtgtgtttatatttgtgtttgtatgtgtttgtgtatatgtgtgtttgtgtgtatgtgtttgtatgtgtatgtttgtgtatgtgtgtgtgtttgtatttgtgtgtgtgtttgtgtgtgtgtgtttgtgtatgtgtatgtgtgtatgtgtatgtgtgtatgtgtatgtgtgtatgtttgtgtgtttgtatgtgtttgtgtgattgtgtatgtgtgtgtttatgtgtgtttgtatgtgtgtgtttgggtgtttgtatgtgtgattgtatatgtatgtgtgtgtttatgtgtatgtgtttgtatgtgtgtgagtgtattgctcaaggaggccagaagaaagtgtcagatcctctggagctggtgttacaggtagttatgagccccacagtgtgggtgctgggaaacaaattctggtcctctgccagtgttcttaactactgagacatctctcttggtccttcccatccccaatattctgtttgagacagggtttcactgtgaagctctggctggcctggaactcacttttttttaccaggctagtttagaactaacagagatccagttgcctctgcctcttatttctatggctgaaattgaaggggtttccttcctctggcattcatgctgagctaacttgtcactctaggtactgtatggagaggcaggagaggacgctgagtgcttcgccgccaaactcctggaagtcatcattcttcagtgcaaaggaaggggaattgatcaggtgatatacactaaaaaagcctcttcctggacacttacataacaaatgtccatgcctgattgatattctacttatatttgatggaaaagtaaaaaggcagccatagtatgtgcttgctggtccaaatcctgtttgaatgataggaaaaaaaatgactcagaaacattcatggcaatggtaacagtaacagaatacaaactgaagcatgtgcagtggagatcctatgtggcctgtaaagtaaaaatcatgtttgctagatcctgttcaaagaacccttgagcagagaaacaaccaaatcaaaggtcttggctgctgagcgtgctaccagttttctgcagaagagcaaggaggctgtggctggtggaggtgtgagaaaagcagtaggaaggaaggaacaggttttatagcaggagattgcgtaggaagcatcagaaaacagaaggcgttagaggagagagccgggaaagggcaagaacctaggtttgcctgcggaaccttccctgagtaaggaggccattgggcagcagagtcatgtcacccacacttacagcctacaggtggttatagatgttcataaaaggaaaatttttctagggtcaaatctaggggaaaatgggccaaacaaaagtcaactgttgtgtgactatttggagtgtgtctaggaaggtataatcatattgttttccgagttaaatatggaatggttttgctttgtaaaccccagagccatatagatggtcttgaatgggctatttagataatgcagtgacgtgtcttgagatagagggaatgtgaaaattgttgtctgatgactttatatcatcatcaacttaggagagttgtatgaagtgggaaaaggtgacagcttcagtttggagggatgtgctaagtaggaagtatttggatcagtgccttcatctgcagtgaccctgtgtgtcagtaaagagtcagtggtgtgatgcagtgagcttgttttagacttgggttccagaggattggaagctcagagctgagcactgtaggtgatggaatgttagtgtggacaccacatagcaccctcaggtatagcatgggcatgatgcttctctgcctttcctgtcagctagaggaatagggtttgtctttttagtcaagaatacttcagaggtccctgtgagttatttctgccaggagggctggtagaaatatgtcagtgctattggtggtgatcatttatttatttatttatttatttatttatttcctattgaataaaacatttctatgaatatattttcctaagtcatcagtattgctttaatttaacagaaatggataattgctatattaattttaaaacttaaggatttccttaactcttggtggctttactatgacagtaaatatttgttaaactttagttttgaaacatgtcagagtttatttatttatttatttgtttatttattttttgggtggtgctggttcttgagacagagtttctctgtgtaaccctggctgtcctaaaacttgttctgtagaccaggctggcctcaactcagagatccacctgcctctgcctcctgagtgctgggattaaaggcgtgtcccaccacagatggctcaaagttaatctttccttgtgatttttactgattcttaactaattattgcaccatggctggtgattttttttttttttttttttttttgggggggggggtttttgggggggggagttttgaggcagggtatctctgtggctttggaggctgtcctggaactagctcttgtagaccaggctggtcttgaactcagagatccgcctgtgtctgcctcccgagtgctgggattaaaggcgtgaggcaccaacacccggcagctggtatattttaatgtaaatgataccagacatgtatgatccaatccagtcctatccaatccaaggacactaaatatctaaatgagaaataatgcttgagttagcattgtagtcagaggacttgagacccacagttgttttgttttctccagcatttttgagctctcatgtgtagcagtaggattttgtttttcaagagacaaatgggtcacttcatagtcttattcattaatttccagatggatatcagttctgtctttgtcatttactttaaacatggaagtggctgagtgagcgaacaccttttcaatctcctgctggcttcagcgtggacataaaagggaatgagacttcttagactaccactgtttgcctacttagtctgttggtctctctgagtttgatgggaacataggtctttaaacgtctcctacacacagttgaaataagcaaacactttactgtcacaaagatgcatttattaaagatacagccagcatcagccttcaggaagtctcttggctgcagtgtgtgggtgactcttgcttccttcccatcctccagtgtatcccgctgtttgttcaacttgtcttggagagattgacccgtggggtcaagaccagcgagctgcgcacaatgtgtcttcaggtggcgatcgccgctctttactacaaccctgagctgctgctgcacaccctggagcaggtccagctgccacacaacccaggacctgtcacctcgcagttcataaaccagtggatgaatgacaccgattacttccttgggtatgtgcctttttggtttgatatggcatcgatgtttcaggaagtttagtttttgttttttgcttttttttttttgttttgttttttgtttttttgcttttttgttttttcaggacagggtttctctgtggctttggagactgtcctggaactcgctctgtagagcaggctggcctcaaactcacagagattcgcctgcctctgcctcccgagtgctggaattaaaggtgtgcgctaccaccacccggctggaagtttagttttcatacagtgatgtgttgagagataatctttatatcttggggactatttctcgtgtatttttatttataaatttttgaagtgtatgtatgtgggcacagttgtatcatggcatgtgtatagaggaatgtctgaggacagctgtcaggagtcagttctgttcttaaacctttacctactgagccatcactttaatccagaaaattaggaatatgttttgaagtatcacctgatggaaagatacattgtatagtgcatagtataatattagttgtttttaattttatttgttttcaagacatattgcatgtgcctaggctggccttaaataattgatcctcctgcctctaccttctaagtacaaggttttaggaattatttttattcatgtgtatgtgtgtatgcatgtttgggtaccctcaggggccagaagaagtcttggctctcccagagctggtgttgtaggtggttatgagccactcgtgggtactgggaatcaatctcaagtcctctagaagaactggtattcttaacactgagtttcttttcccctagcttttgtctttttaatttttgaagtatttaaacaaaggaaatatttcatagaaaagtatgtgaccaatcatttttcctttgtaattaaaatctccttattctgttagcagaggctgatggtagatgtgtgtaggcaaccaggtcaatatgctaggtgctgacttcttgaagtatttttggcacctggggttggtgtggatggaccatatctgccaagaaagcttgaggaccaggccaagagagcaagtctacagaattatttttcccagtgtgtaggaatcttacgctgccaagtagacatttcagctctaacaaacctcattgtgttaacgttcagatacagctcttttattaattgtaagtggtgttattgcaaaattcaaaatgctaattgtagactcctgtaagccttgtcctctgtcccgtaaccaagtcttatcttacagcccaggctggccctgaaattgctctatagtccaggtttaccttgaatttatagtacccctgcctcagtgtcttcagagatgtggttgtagggatgagacaccacacctgacctccctcacaggtctttgtgataagagttggttggttggttggttggttggttggtttgtagaatttggtttacgcagggtttcacttgctttagtttttctagagcagtggttctcaacctatgggtctcgaccgctttgactaacctctgtctccaaaaataatttccataatgattaacagttaggaaaattgcataaaatagtttatgtcttggagcacaattgaagtgagggaggatcaaaaatatgaacaaggagtcaagaccatgatggggaaacccatagaatcagctgatccaagctagtgagaggtcactgactcaggtctgacaaatggggaacctgcataagaccaaactagactcccttaatataggtggcaatggtggggctgggacaatatatgaggccactgacagtgggtccaagatctaactctaatgcacaaactgacttagtggagcccattctatatggagagatacctttcccagcctagacacagaggtgtggggggtggagaggggccttggtcctgcctcaacgagatgatgggacagacttagtagacttgggagtagactatgggaggcctcaccctctccatggagcagatgggaggaggggggagtgcaaggtgtgcgaggaaaggagggagggggaactggggttctattgtaaaaattaaattaatgaaaaaagagaaaaaaataaactagtaataacaaaaaagaaaaagaaaatagtttatggttgggggatcaccacaacatgaaggagtgtattaaagggtcacagcattaggaagagtttgtcctttgtgaccacatctgcatattttccaacatctgcagacaccacgaccggaagaggtgtatcataggactgagcatcctcttggaactgcagcaccgacctcctgctgtggacgcagtggctgcacagatcctgccttccattctcttcctgttccttggcctgaagcaggtctgtgctacccgtgaactggtaaaccgcggagatccctcaaaagcagagaaagccgacatggaggaaaatggtaaagcctgctacttatgattcactctatagtccattttgctttttaaaatcagtttatcattaatttgatattataaaaattaaattattattttttgtgcatgagtgtttgccagcatgcatgtttgtgtgccatatgtgtgcctggtccctgtacagaccagaagaaggtgttcagtctcctagaactagaattcagattgttgtgaaacaccatggtttggtctgagaaccaaaccctggtcctctgcaagagcaaccatggctcttaaccactgagctatctctccagccccagattttgctttaaaaacttaaagttatacttgtttgtgtgtgcatgtgtgtggaagtcagaggacaacttgcaggagttggttctttgctatcacatgggtcctggggattgaactcagatcttcaggcttggaggcaagtgcctaactcactgagccatctcactggcctgtgcttttttgttttttgagacaggtcttgctttgtagctcagactagttttaaattcatgattccccttgattcagtctcctgtgtcctgggaccatgtgcatgcactatcatttctgacctggagtttgatttgagcacacattttctttacattttagcctgtttgatgtcattggagtttctgttcagcctagtcctgcagcccttcagttccaaataaacacactgaggcttgtattaattagaaactgtttggccaatggctcgggcttcttattggatagctttctcttaattattaatccatttctagtaatctaagtatttccacatggtcttatcttaccagagaaagctccgaacctgttactccttcctcaaccacatggcatctccccagttgacctctctctgccttacctttcccagaattcctctggtcttgtaaccccacctatacttcctgcctggctactggccagtcaagcaataatatatacagaaggaaatctcccccatcagtttggaatcattaaacagactgactttccttggcctgcgacacatttaaactggggctgtgtcccttgataccaaaaccctcagtgacttctaagtggagctcagtcgatgtggttttgccttgagaagcataaatgtaagagaatcagatggtcttgactatgaattagcaacttaagacttaacttttttgtttatactaacaagctcagtgacagtagctaccattaactaaatgactccctagattaggtatacactgtcagtacaagattgttacacagatggatgtttttttaaagtggttcttgggtaatttgtcttcaaaaagtacaatttcaagatacttaaggtttagacaaactttatcaacaaactaggattctgtggtggtttcacatttccagattatttcataatccttgtttttcattcttttacacaattaatgggctcacagaggagatttccagtgaggaggaggaggagacaagtgttactgctcaagctatgcagtcacacaatggcagagttgaagaggaagaagaggacgactgggatgaagaagtgctggaggagacagccctcgagggcttcagcaccccactggaccttgacaacagtgtggatgagtaccagttttttacacaagctctactgagtatgtcttcacctccccccacctccattccccaaacctgaagattgttttttaacatttttaatttcttcctgttagaagttgttttgggatctgctcccatactggtatagattctctgagattttgtcttttgctttagaaaaatatccaaacatacttaaaatgcaaaaggttagcatcatgacacactcaaaaagcaatcctagactcccattgctgtagtagcagcatcaggatgggcttgccagccatctttacagatgtcatgttcagcacaagtgtcagaatggctgttttctctttcacaaatgagatgttagtggttgaggagcagagaacacagacatttcaattcctaatacatgcacccaatctccgaagagtcatacgttgtgtccacgtacccatggagagccatgtgctgtttctccttgaacttgttccagtgattctccagcctcacaggtgtcaagctctccctaagacctcatgtaacactcagatgtttacaatcctccatcccactgacccacagttttctgccacagcccattataatcacagttgttaggaaaacagatggccatgaccagagacgttacagttctgacagggcaagggcaagggcaaggaccgaggaatatatataatatatatatattctactagaaacacaagaccagacataactgaaaatactctagacacaaatgcagaaccaagactcctaagttaccgcttcgtatgctttgcattgtaggatgtaaaaccatccccctctaacagaatgttgtagtgccccccgagacagtcacagcctctcctgattcagggtcctgctattttctggttgttccaaaaaaaataaggaaccagcaaatgatttaacctcttaaaatattgtttacacataaaaagaataggataagatatgatttcccccaccttttaaaaacgtttctagagctgctaaaaaaacttgaatttacaaatagttgatagaaaatatccctctgtattgcacaagatgggaggcaggggccaatgacagacatgacgggtggggccttttttggcttcctgtgcactttggtggatgggctcggctgacagccttgcggagtagccttgcagagtggtgcttgggctcctccacctttgccactcctcttgagctgaccttccacttgggtgtcatggtggacccgggggtgggagacatacatgatgccaactcagccacagagctgcactgcctgtccaccactgtacgaactcacaatggccacttttacaattgcgggtaaagtggtccaggcatgcagtgctcaaccactgtggctgtgagcctgttaattattcccaagtccttatgggaagacacagaggacaagacccaatgaagggatgcttttctacattgacttcactgactttgtgcagagagtaacacttgtaagttataggattccttaaagccacatgtgttcaaaggccttgccaaatgagtaagagcagtagacatgaacacaagagggagatgtggatggaaaccttagagataatgccactgcaagggaatgaagagtaacactgagaaaactgggattcagatgggttgggctttctagttaagaagctgcagtacccttgaagctcagtgagtttgttatacacagttgaacagggggtggggttattatagacaactgtaaatgttgggtggcaggagttgggacgagccaggatggacattttctgcacacactgtcaatatttgcacatggatccaaggaaagctttgccgtactctgagcctcctccagagaagctttgctgctcccatggggctgaggctctggtgtccttgacatagcggtgctcatgtcaacaacacacattcaactcattcactcgttccctacaaataaaaatagagaataagccagtgaaatacttagaaaattattaacctataacttgtacttaaaaaaacccttaactaatgtctgttatttgctttatggttaaatagtagttctgtgtgttatcatttatttctactattagatgtttaatattctcaggcgcgcctactacttttgccaactaggcaatgccagcataacacaccgccattatttagttctgacacaagtataggagtgctttgaaagccagctgtggagatagggataggaaggtatgctccaggatggtcatctgtagacacagcatgcaccctgaccaccacaggagctcttgggtctcaagtgcagcctgaacatgcacaacagtttagaaggtcccctgctggggttgcatggctgtctgttgacaagcgtgggcaggagttcctggggaggatggcatagaactgagggtgactgccttgaataaaggcttctttttgcccagcacagagtggggtggatcttcaggatcccaagcaacgtgagattgttagacccaggtgcacagtgtggactctggtgggaagagtgtgtaggtagaggacgttaagagacaggcagagtttgatgtgggctgggcatggctacagataggaagggtttagagctgtgataaaaatgggagagtgaaagcatttagaaagatgttgaacttggtttcagtcttgttaagtttgaagcatttagttggaaaagtccaggaataaaggggaaggattttgcctaagggtgcagacttgggccctcagtgtagaaacagagctggtacgaagatactaggaagattccaggaggacggtaacaggtgagcccaggtgtttcccagtgtcaggcattctgggatatatatatatatatatatatctgggaaaacttgcagaaaaagaagatagaaaggacagaattagggaaatcacacatttgtaacggggacattccttgtggatcctctcggttgggtgagtgggccctcagaagtgattgtctgttgggatcgggatcagttttattatcccgtgtcttactaacttcattgagatctgatcgtgccacttacttttcctgagataataatggtcgctggctgtctcccctttccttctccaaacccccccgaaaccccatagctgtgcagaatcgggatgccgcctggtatcagctgctggtggcaccactcagtgaggaccagaagagaaagcttcaggaggtgtacacagtggcagagcatcgacggacaatggcaggtcagtcccccggtggctgccatgtgccacacttaattaaaatggctgaagagcagcccttcgtgaaaatgagcaatcccattgttttgtttttaagacaggatcttgctatgttcctgagctggcctgagtgtgtaatcctcctattttcatctgtgtgtgctagagttactagtctgtgttacttctcctgggcttgttttttctctctttttgagatgctggagtttgaactcagagcttcgtacatgctgggcaaataatgtaccagtgagctatgatcctagtccttccacctcccagtctttctctctctgtctctgtctccgtcgagattgggttttactttgtagcctggaactcattgcatagtccaagctaacttcaaactcactatcctcctgcctcaaccctcattaaggtgtatgccaccatgcctactgttttttgttgttgttgttgttttttggttttttgagacagggtttttctgtggctttggaggctgtcctggaactagctcttgtagaccagggtaatctcaaactcacagagctccgcctgcctctgcctcccgagtgctggaattaaaggcgagcaccaccaccgcccagctttttcctttcttttaaaatgagatgttctggtctagcctcaaatttataatctttggacttgtgatcttcctgcctcaaccttctgagtagctggattataggcatgtccctgtaccactaggcccagtttgatggttctttttaatcataatattgtatctctctcaacatcatttctgggtaggggttattagtgtttccccaactcacatcctcctcatgttttggagaagtaagggttgggacaagtctttctgagaaagactttgtcagcccagtatccacctaacatctacaacagatggaccaaaaagcaccctgtggatcttagaaagagcttgtattcttgaaaatgaaatgccacgttgctcaggttatcactgatgttacttggtacctaaggagatcaacttaagaggagaaggttttattttgactcttggttcagtcccttgattttgagcctctggtgaggtcgtgtctcctgggaggagtgtgaggtggaggaaatgggctggtttccagggatctcagcagcagcagcagagagaatgggactggactccaagtatcccctttaaaatcacaccctgtgtggctcaagagggggctgagcaattaagagcacttgctactcttgtagaggacccagattaggttcccagtactcacatctggcctcttggacacctgcacacatattgcatacactcggcaaatgtgtttacatgcacactgactctctctctctctctctctctctctctctctctctctctctctctctctcacacacacacacacacacacacacacacagaaacctcacttcctcccacaaggcctctcctcttcaaggctctgctacctcctgtagtgccagagtctgggaacccagtgttcatcgtgtggacttgggacatttatgacccaaaatggagcaagttctcatttatatttgttggcaacttgtcaattttcagcttttatgaaggagaaattgtttaatgttgggattttgagctcactcctgggtcattagtgggaaagattttgtggttacaaactatttcagtgggagatgggagttttagttgaggactgttcttcagtgtcactgtttggggtagggagcaatgcatgttttgtcagcatctgatgctgagtggaacctgcagcccttggctcccagcttcagaactgtttacatttcacttactttagcaaacagtttttccagggtaaacataactgcttgtcagtatggttttgttaaaggctggcattcatttagatggcaccactaatacgaggaatcgcattcatttaaagtcgtaaatccatagaaaagaggcaggcatggcaacaaggtggggaggggaattggtgtatataatcccagcacttggggtgcagaggcagggggatcaggagttcaaggccatcctcagtcacatagtgagttagctgctaatctgggctacatgagagcctgtctggaaacaaaactaaaaccagtccacttcatgaaagtctggcacttgaaggtttcttctatactctcaccttaaacatccttttatgtcttccctcccctctctgttcagtagcagggaggcttcacatttgaggacaagggcatcttctctgcctttacctttggggtcgcgcccagcaacaaccgaaaggcgcatccaaccgttcaccgaccatcatcaccgttgctgcatatttcacgggatgcgagagggccgagagagagggaagcaaggggctgtgtcatcggcatcaggcagccgtggactcgctcgcccttcccttgttccttctaacctggaatacgtatttttcaacagctactgtaatgtacgaagtttaagaaaagcagaatcattgatcagaaaggacaaagcgtctgctcggaaggacgaacgctgaggggtttagagttaggtacggcgcatgcgtctcaggtttttgccatgcagaatcagtggatttatgcggataacagtgccttctgttgtacatgaattatcagaaaaaaaatttttttggagtgcgttgcaatttttttaaatcatgaaacgtatttctagataccctgtaaccttggttatgtgtcattttattctgctttttactctgtactgactgacaggcagttagtgcaagtctcactctggtttcagaaacgaccctgccccctttggccaccctgcgcccagaggatttttcttcaaaggttggagcttaggcagtggctttggttttccaaaagtcatctgcagctttcctgagcactgttgtatattcccttttccatcacattttccctcttgaacagggtgatgtttcttttaggatcacaaatgtgttgattacattgtaacctgctaagttcagggtttacccgcttcttggcagccggcagcagagagtggttagttactgttgtcagtcactgggcttagcagctgagcaagaccgaagttcttaggaatcatgtgtttaattatgctgcaggggttgggggcatccaaatacgaaggcacattgaagttctaagcagacagtgatttctgtgtggggacttggtcggtagtaacttaccattcattctagccatgtaggacagggcccaatgcattttacaattttttttttttttctccttccagccctcttctttttgagatagagtcttgctctgtatgcaactcaggcaggcctcaaagttacagtcctcttgactcaacctctgactgccattaacacacccagctgatttttaacttcttttgaagtcagggtcttgctacccagttctggctggactggaactctctttgcagcccagtctggcctcagacttgtggcagtcttccagcatcagcctcccaggggttggagttacagccactacagaggatttccatttagtaaaaagacctaacagatctagcagcttgctttctcacagtctgaaattcctccagcctgatttaggttgtcttttattggggctcagttttttttttttttttttttttttttttttttttccannnnnnnnnncagctgggtgtataggtgagtgatgtcagtattgcagatgaattttcctcaactgttcaaatgcagaacatgaaccacagtgctttcatttggcaaaatggaaatatgtcatatatgtcatcaggacttgacgttatttctggatgtgatacacattgtttttccctgaaatatctgcagttaaaatttccatcagcaactggcagaattttctaggtgcttcctgaattaccaacccttactctttgtaaaaaatttaggttatttaattttccccccccagaagtatcttgagaagccatacatttcaaagtgagatgaccctgtatttttcatcgcccctttttttttttcagggcaccaaagctgcatgtcccccaacagttagaagggaaagattgcattgttgggggattttagatctttgaaatagtttggtttctctcatgtctcatacggtttaattataatataggtaataatgcctacacactggatcttgggcgtgggttttggagatattactttgttttgtggtgaattgtcatctgcagtattaaagggaagacatagtcctgcacgccaccacaccttgtttttgaagccagagtcattgtatgattttattaccagaagtgctaaccgggatgtgatctggttaccttgaaatgcaggaacttacatgaatgtactgtatatgtataataaaatgtgggctaattcccagaaatggaactgtgctgtatggaatgttttctgggatgttgaagtgataactcattggcatgtttttccgacttccaggaatctgaacacaagagggctattggtattgagaggacagcaggagatgtcagagccagcaggtctcatcatgaacagtgagagcaggggaatacttctgcaggccatggtagtgtatcctggtagacaaatgataaagaggatgagacagggggctcactggtttgaggccagcctacactatacttttagagcagggcacggtgacacattcatgtaattccagcacttgctagcaggcaggaggatcagttcaaggccatcctcatcatcaagctgagttagaggccagcctgggggggtgtatgactgtctcaaaattaaatgtataagaatttaaaatactaaaaagtgaattgaatagcatttcagaaaaggattatacactgtagtcacatgaaatttatcctaagggatttgagaatgttttgacacatgaattaacacacctgtgagacaaaaccaccatcatttcaataaacatggtaaaagtagttgataaaatttaacatcctccaataataaaaacttgaaaaagtttagcaagaatttgcctcaacttagtttcatatgtagtaaattcaggtagcgccatattaaatgggaaaaattgaaagcatttcttctgagaactaactttggctgtttttattgttccagaaggcttagcctgagaaattaggcaagagaaagaaatgggggcacccaaatcagaaagaggacctttttttaaaaaaaaatatcttttaaactttctttttatttattctttgtgactttcacatcttgcatctcaatcctacccatttcctgccctctgcctttgcacccccctcccccccataaaatagaataacatttaagagaaagaaaaagaaaaatctcatcatggaagctgtcgtgtggcacagcgagtcccacagtaaaccgttttatccatgtatctttatgtgcaagtgttcattgcaaagtgttattggtcaggttctaatacactattgatgctggtccctcacatggacgactcctggctatcctgttgttgccctgtgtcatggaggtcctgcagctttgggtctgcaggattggccccttcaggtgctccagcagatcacagatggggtgggccaactcatagccctggttctgggtctaaataattgctggcttggtcagcatgctggctcttcccccatcctcacctccaggttgagttctccagcattgccctggctagttcatcccttggagcaatgagcaaggggaggagccagttctcttgctttcatgccctcagggttggttcttcccacacctataccatcagggcagctctactgtgttgcccaggtgaggtgtaggggccattctctgtagtgctgcaggtggtgaggggcaggattaactctcctgatcttataacctcagggccagctctcccacctgccacaggcagtgagggggaggagggcatctcttccctgcccgcgccatcacatggcagatgaggggtgggatcgcccatgctcatgttctcacccgaacctctgtcaatagggtcagctttactgtgctgcccgggagaggtgttgggtctacagaaagaggactctatttctgtttgcaaatagcatgaatttaaatttttatttttaaattttacagtttttttctgacaatttttttaaatgtagtatattctggttatgcctttccccctcctccaattcctccaagatcctccccatcacatgtgcatatttgggtcctgtcataaaggttctagaatcaaattcggttcttaaggcttgacagcaatcaccttacctagtgagctatcttgggggcctagcatgatcttacacaaagaaaaatctaaagacacagctaaaaacctgttaggactgaaaagaagttcagttaagttgcagaatgtaagattgacttatcaaattagcaagcatatctctacatgagtaataaacaagtagaaaaatcaagagaataataagagttacaaaaataaatataaccccaaaacctataataaaattgacaagggaaacaaactataatgaagataaactattgatgaaagaaactgaagacactgaagggaaaggtactccatgttcacagattggaagattattatgtgtgtgtatgtgcatgtacacatgtgtgtatgcgtgtggaagccagaggctaacattgtatatctttaattgattcctactttattttttgagacattttctcttgctaaatctacagttcatcaattggctagattggctggccagtgagctctgaggatccgcttgtttccgccctagttaccaccaatactagggttacagatatgtactgtctactgaatgatgttccttgattccaagatggcttctatgagtccacaatgaccctcatgacttcaagattgcccctgatgcaagatggatcccagtggttctaaaatggatcccatgccttttaagattgctgccagtgatcttgtccagttgtcttctatatctcttctgtaatgatatggcaaacaggagaccaagaacccaaaattatatgatggataaagaaagcattttcaacaaatggtgctggcataactggatgtcaacatgaagaggaatgcaaatagatccattatctgtctccatgcccaaaactcaagtccaaaaggatcaaagacctcaacataaatccagttacacaacctgatggaagagaaagtgggaagtagccttgaacacagaggcataggagaccactttctaaatataactccagtagcacagacactgaatgggaccccctgaaacccagaagcttctataaggcaaagggcatgtttaataagacaaaacagcagcctacagaatgggaaattatcttcaccaaccccacatctgacagagggctgatctccaaaatctataaagaactcgagaaactagacatcaaaataccaaataatccaattaaaaatcggggtacaagatctaaacataatcctcaacagaagaatctcaaatggccgaaagacattcaaggattgctcaacacccttagccatcagggaaatgcaaatcaaaacgactctgagattccatcttatacctgtcagaatggctaatatcaaaaacagctcatgctgcagaggatgtggagtaaggggaacactccttcactgctggtgggagtgcaaacttgtatagccactttggaaatctgtttggtagtttctcagaaaactgggaatcagtctacctcaagacctagcaataccattcttgggcaaataccataccacaagaatacttgctcaatcatgttcatagcagcattatctatagtagtcagaacctggaaacaatctagatgcccctcaactgaagaatggataaagaaaatgtggtacatttatacaacggagtattactcagaggtaaaaaacaataacatcataaaatttgcaggcaaatggatggaactagaaaaaaaatcatcctgagtgaggtaacacagaccttgagagacacattgtgtactcacttacaagtggatattagatgtaaagcaaagataatcaggctataatcctcagccctagagaagccaggtactaacaagaatcctaagagggaggaatgaaccacactgggaaggggaaatatatgagatttcctgggtaaactggggatggggctaaaggggaggggatggctgggttgggggaggtacagagaggcagagcaatgaaagagtatcttaatagagggagccattatggggttagggaaaaacctgtgtcagggaaatccccaggaaaccacaaagatgaccccagttaagactcttatcagcagtggagacggtgcctgaactgatctgtaatcagattggtgataccttaattgttatcataaaaccttcacccagtaactgatggaagcagattcagagatccacagctaagtactgggcagagctcgagtccaatggaagagagggaggaaggactatatgagcaaggggggtcaagatcatgatgggggaaatccagagacagctgacctgagcttgtgggagctcagggactctagattgatttatagctagggagcctgcagtagaccaacctaggcccttgcatgtgggcgacagttgtgtagttggtctgtttgtggggttcctagcagtgggactaggatctgtccctagtacatgagctggctttttggagtccattccctatggtgggatacctggctcagccttgatgcatggggggaagagcttggtcctgtctcaacttgatatgccatgctttgttgactcccatgggaggccttaccctttctgaggagggggggcatagaaaaaaggtggtgggagagaatgggaggagaagagtaaggggaaactggctagtatgtaaaatatttaataataagaaagaattttgatgacatccaattaatcaattgacttttaaaagcttatgataagtttttttcccaaaaggacactattgtgggctggcagctttgcttcccactgaggccctattccccaatatttcaggatgtgatctcattgagatgggaattcacagagggtcaagtttgaaattaggttatgggaatacattctaatcctaatggctgtatcctacataaaagggaaatttgagggcaaatagaaagaatgctaagtaaacaaatgtagagattggaggggtgtcgtatctttacaggccacaaatttccaaattgctgtcagagttctagaagaggagagatgcatggacccagaagggcctaccagcctgtatctagatctggaagctttacctccagaagcacaaaatgaattactgttagaactttcatttggcgtatacatagcgtactcagtaaacagcttgccccacaagcatgaggacttgggttcaatccccagaacccatgtggaagagatgggtttgtcatgtgcttataatctcaatgctgaggaggcagaggcaggtggatccctgaggttccagggccagccagcctaccctcatcagtgaactccaggccaagatgagatgtcgtctcaaaggaggtggattttatccctgaaaatgacacccggtgatagattacaaataaacccaaaaaaacaaataccagcacacagctgctcttgaatgaacatgcacacccacacggactaaataaaagattcactttgtgagtctttattaccacagtcctagcaatggtcactaagtcatgaaaatgtcttttctttttttaaagaaatttggagcaatcttatgaaagagttcttgagttcagaatatttcagtatgtcctaaagaagccagaatttgctggtagtgctaatgtttttattggaatgaagatcccgccttgtctccggtaagcagcgtgatttcatctttgaaggttcagaagtacagttttggtggcaggaagctgcagtttgctcagctatcattctgttcctgttgaggaaatgctttacttcttcattggtagatagaccccaaacagaaggttttggaatgaaggggggagtagtgaactgtgcttgtagtaataagtggaggcaagaagtcttgcattagatttcagcagaggctgagctgtgtctcttccgtgtttaatgtcatcttcagctctactggtctgccggaaaccacagcggctttggaaattcaaatagacaaggggactcatggtatcctcagtctcgtcacgatagataggaacccctaagatggaatctgatactaagggaatctgtataatcacttctgtgattctcatgcattcttacgacagtcttgaggataagtccctgctgggatgctaactctgaattacaagcattctagccaggtgtgacagcttctgtgttagctcttgggagccagaggcaagagaattgagaagagtttgaggccaacctgggatagatgacagaaagtcatgataagatgctagggaaagagaaacagtttttaatataccatcttgcagaaagggatgacaacctagaggatggttttaaagtccctgatcacgagaaattcctatctattcctcccacccctccccccccctttttttttaaaatttggtattgtggtaaaatacacataaagacaggggctggagaggtggctcagtgtggttaagagcactggctactcttccagtggatccagggtttgatttccagcagtcgcatggcagctcacaaccatctgttaacgccagttccgggagatctgacaccctctttgtattagttagggttctctaaagaaacagaattggtaggatgaattgtgtatattaaaaggggatttattagagaggcttacaggctgtggtatggctagtccaacggtgggctgtctcccaatgaaaaggctaagaatctggtcactgttcagtccaaaggccaggtatctcagctggtcttcagtctgtgttggaatcctgaagaagtaggttctaacaccagcaaaggaatgccccagcagtagggaagaacagcaagaatgagggtaaacaggtaaaatgcagaagcttcctccttctgtgtccttttatgtaagctgccaccagaaggtgtggtccagatttaaggcgggtcttcctgatcactgtgaatggtcaggacccttcaaatgaccaaatcaagagtaatctctcacaggtgtgtccacctgattccatatgtggtcaacttgataaccaagatcagccatccccacaggtaccagttatgcatatggtacactgatatacatgcaggccaaacacatacaaccccccttcctcccccatacccacacttggtgtgaaccatcctattcctaagtgccccctcttacatttaaatctatgttaaaatcttttcacaataaaattgcttttaaaattacaatttaccatttgtgatggtttgaatgagatgcctcccattaccgtatgcctgtgtgtatgcacaggtgtgtgtgcgtgcatgagcaggcacacacacacacttgtaggtgatgacagtgagcatggctccaggaaactcacagagatcatttctgcttttaaataaacagatgactgaagatgttagagccagactgtgagccacagagctgaaaggatttatgtttgcagcacacagtataaattctgaattgggctgatggctaggggttcttactggctagctctctgttaattattaaaccataactactaatctatgcatttctacatagccttatcttaccagagaatgcctggtgtgtcctatcttcccagactctacatggcatctccaggtggcctctcttctccttcctctcagtagccctgcctatacttcctgtctggccaatagggttttattcatcaaccaataagagaaacatatatacagaaggacatcccccatcagcttctggttctcttttttgagaaaaacataattttgcctgatggttaagacgaccccaggtagcaactattccgaaagaacaacactgttgatatttttgctgtgtaatatctcccatctgaccaagtggccagaactacagtttcctgtctctgtttaaattgttcagagtgtaacctgggactgggacccaaaagaaatttaacgatgacagcatatgtaaattgcataagcctgaggtgtaacagtgctacagatcccacttaactgtggaacatggatctagaattaaagagcagtgtgatggtttccaagggacggtctgtgagggcaagatgttcgccaaaaggcacaaattttcacttacccaggatgaatagttctggagactttagcatggtggctctagttaacatactgcattcttgaaactaagagtagatctccagtattctcactacaaaaaccagaacaaataaaaacactggtagttattggaggtaactgacatgttaatataggttggttaagccagtcacttgacaatgtaataaagacctcatgcaacacacattaaatattacgtgtgtgtgtgtgtgtgtgtgtgtgtgtgtgagattatgggggcactcaagttcgtgaaaattatgggtaaggcattttgtatcttccttactgtgcaacatttccacagcccaatgccggtagcacactaaaatctctcttcttgaaatggtcaacctgcattcccccacccgaaaccctgctctgagcaggacacaggtccccaatggatccatctgagtggcatcactgtccccactgtgcactccatccagtattgttacttttagcttatgtgacaggtgttgatgtaccttcctccaggaagtgctgaaccgtctaggtcagagaatgggcacaaataattatgctatggttagtctggcttgcaaggtgaatcaacattttaaaatcagttgcaaactttaacattttgcatggaactagctttctgatgccttttgaaaagctggaaaattctgcattccaggactcaacagttgtgagctgggctgactatgttagatgaagcaatggtctttagctcagttaattagcagcctggaggcactcacacgtgaagctggggaactcaccaggctttgttctgaaccacataacagcaaagtaagcttgtcttcttgcttataaacggctatgcagttcagagcacctatctgctccagcctaaaaggtcacaggacagcattcaatctcttctcattcaaacttggaccctcacacattaagcagagaacttcacccaccactaacccatccttggttatgactctgtgggtttcaagagtgacctatgctcatattccttttaatcatagtctcaggagtgtgctaacaaacctgctgattaattcacttttaagtggttttccttttctttcctcttttttttggggggtggggtggggtagggttttctatgaattattttctcattgctgcaaacaaatacctggcaagaagctcttaatggagggagggtgtgttctggctcggggtttgagcagacatagtttattatgttgaggaaggcaaagtggctggggctccctgacagcaggatcatgaggttgagtcctcataggttggtagaacaggaagtggacaatgtcagtgctcacccttttctctcttttttccgtgaaggaccatatcctatggaatgatgccacccatgttaggttgggtcttccttcctcagttaaatctctctggaattaccctcacaaacacgcccagagatgtgtctcctaggtgattccaaatccagtcaagttggcaacgattcgccgtggcaagattgaacccagggcctttctcatgattaacttgctttttagaggaactttcgagtttatttaatgaagccttctgggtagctttgatttaggtgggttcctttaatttcatccatactgctttggtctgtgttttcatccactctgaggaaggacagtgtgcccccatgagaggcccaactagggccagaaaaagtcaaagatccatgttgcaagtcacctgagaccacttggcctctgttacccagaccagtgtgaaaccaggcctcttggtaagggctactttaattattattccattatgctctatagaaaaggaacatggacacagtagcccataccagtatccaccagtcaggcagtctgtgcaaacacaatagtggtgtaagcctgtagatttcacaccacacattttataagaagatcctctgtcagatttgtttttacttttacattgtggtggtggtggtggggggaagggaactagtaattgttaaactactgaggttccatcttggcttagcacttccactacttccaaggtcaagtccaagccatcgaggccagcataattccccagcaatgttttcttcaatatgctctgagaatttttcattaccactgacagcttgctactatggagtattcaaccagaaaaatgaaaagggaatgaagagtgaaaattaaattaacacgttcccagagataacacctttagctcatgaataaagaggtgttagaaaattcacattaggtgttgtcaagatctaaatgtcaggataccttctgcatctgttaccaccgataccacccccttcaaaacagagcttaaaaataacctgaaaagacctgggttttcaggagcacagtttataccaaacactgagattggaattttttcttcctgaaaagatacattaataccacaccttcaagaagtaaaatatggcagaaagaagtagtgaagctatcaagtttaattttctttccccagatatgtaaaaaaaaattcttttttgagacagggtccttctatgaatgtagctctggctgtcctggaagttacatcaacgaggctggatttgaactcacatagatctacttgccgctgcctctttgaatgatgggattaaaggtgaggcacacatcatatgttttaaactaaaatgttttgttccacttatggaaatctgggatagttttcaacttttgggacccaaaaaagctaacaaacttttcaaagtaaccatgcatttttaggaataaataatctttccaatggcttcaatttcaagaatgcacataaaattgtggggcaggcacaagtgttgccggcagctgacctttctctcttctcactgatgtaacctgagtgagtaaagtgctacttttaggatctatgaaggtgccaggtgtatggctgaggcaggaggattgctatgagtttaagaacagtgtgttagtttatgttgttgtgataaaatatcacgacgaaaagaaacttaaggaagagttaattttggtttacagttccaaagggggcaagcatagcataggggcatgggcaggggcaggggcaggggcagggagtagcagagtgatgacatttcatccctgtacaggaagctgggagagggagagagagagagagagagagagagagagagagagagaaagagacagagatacacagagacacagagaaagagagagggagagagggaaggagagaaaaaagaaagacgagagagagacagagggagggacagagacagagagagaaagagacagatacagagagagacagacagagacacagagaaagagggagggaggaaaggagagaaaaaggacaagagagagacagagggagggacagagagacagagagatggagacagagagggagggagagagagacaagaaacagagacagaaagggagggaagggctagagagagggagagagacagagacagagaggaaggggagagagagagggagggtgagaatgaatgaatgaatgaatgagtaggaaatgggttgaagctatattcaaaacctatttcctctagcaaggctttctctgaaagcttcctcaaacagtatcaccagctgtgcctagagatggggtattgttataggcctgaccatgtgttgatcaggggaaatccggacttttggagtttgggttaggaaagcagtggactgcactgagcatggcataataggccatgccaacaagcatggaagacagtggtgctgagagtgatttgaacagtgggggttggctcaagaggtttcagaggagaagaattttttttttttttttaataatttattttatttgcattggtgctttgcctgcatgtatgtctgcttgagggtatcagatctttggagttacagacagttgttagctgctatgtgggtgctgggagttgaacccgggtcctctagaagaagtcggtgctcttaacaactgagccatctctccagcccccagaggagaagaattttaatatgttgacttgagatcatttttgtgatattttggtgaagaaagtggctgctttttgcccttgtctgaagagtctgcatgaggctaaagtgaagagatttggattaaaacaacatattgcagactctattgtgtggttattattggtcactcatattgaaagacccctgaagaggtactttcgtagaaggagacccgcacccattatgtgggtcattactacattcaatgggggtcagggattgtagcctccaaaggcagtggcactattagggtgtgtggctctgttggagtagttgtgaccttgttggaggaaatgtgtcactgtgagaatgggctttgaggtctcctatactcccgtgactcccagacaacttcttgttgtctgtctcaagtcaaaatgtaggaatctcagctctatcaccagcaccatgtctgcctgcacaacacaatgtcacatcatgaagatagtggactaaacctctgaaaatgtaagataccccaattaattttttctttataatagttgttgtggtcatcatgtctcttcatagcaatagaaaccctaactaagacagaagttggtaccaggagtggggtagtactgtgatagactgaaccatgtttctgtttggaataatatggattttgggagtttggtttaggaaagcagtggaatgcttcatgtgctgcttaatggacaatactagtaggagaatggaagaccatggtgctgagtgtgatttgaactgtggggagttgactcaagaggtttcagaaaagaattttaatgtgttgcctagagattattctttttatattttggtgaagaatgaggctgcattttggctttgtttgaagagtctgcctgaagctaaaatgaatagattaggattaataccatttgtagaagaaatccccaaacaacctcttatagactctgtcatgtagttattaggggcaaatctaggaagatttataatgaaaaggagcaagaaaatgtaaaatttgaaaaaaggaagatcaggaagtagaatggagctaaatcctgtgttcaaggagatgaacagattaagaaatggaataaagggagtggtgacctcagggctaatatcccacccagttaaagtttccatcttgtggaaaggaatgaaagaaagcctagagctgtgtgtggtggtgcatacctttttttttttgagacaggtttctctgtggctttggaggctgtcctggaactcgctcttgtagacctggctggtctcgaactcaccgagatctgcctgcctctgtctcccgagtgctgggattaagggcgtgtgccaccaacacccggctggtggtgcatacctttaatcccatcacttcagaggcagaggcaggtggatcatgagtttgaggccagcctggtctaaggagttcaaggacaacaaagcttactcagtgaaggtaaccactgaaaccaaaagctggtgaagatgtaattgaacaaggggccatgttccagccccagcaagcagcagaacttggcagctttggccatgtggttttggagttaaggacagaagaaacaggttatgaaatttgccttcatgactaaggaaagccactgaggccaggcatgagtcaggggtgtccctgaatggagacttagaggggccatttcctgaagctgtgaagttgaagcctgaattgccctggagaccccaagatgttggagatgccagagctgtgggaaagctgctgaggaagctgctaagagggagtggaaccagcccgagagaaagaaggtgcagtcaacaaagttgaaaggggttagagatctgaagagcgttttttttgtttgtttgtttgtttttttacttaaacagtctttaatggaagctgtgtatgaggggctcctactcctgcatcttctcaattgtttcttccttgtatttgcccttctcctttcctacttgtcgagacttggctttcctttccaggatcttctttcggtctttgtccagctttagcctggtgataaccaccttgctggggtggatgcccacatggaccgttgtgccattagctttttctcgctgcactcgttcaatgtaggtgacgtatttcttcctgtacacctggaccactttgccaatctgctgacctttgtagtgtcctcggacaaccgaacttcatcatcctttcgaatgggcatagatcaaacactgtacttctgtctcagctctttggaaagaggggaagacatgatcttcctccggatgtgagaaggtgcattgaaatgccatttgcagttcttgcttcggtcagaagtcaccaagggattgaacttcattttggcggctgcgatccaacaatggccgcctgaagagcgttttgacgttagacctggagatacagagtttggagtttgcccagctggtttttggtcttgctttggtccactatttcctcagtatgctcccttccctgtgttttggaatggtagtgtatatcctgtatcattaaatgttgaaagtatataatctgctttttgacttagattttataagggattacacttaagagattgcatgattttagaagagactttgaactttagacgcttaaataagtttgagattgttatagactttgaggacttttgaagttgggctgaatgcatttttgcattttgatatagctacaagcttttgggggccagggagtgagtgtaatgtggtggtttgaaagaaagtggccccaaagggagtggtgttattaggaggtgtggcttttttggagtaggtatggccttgttggaggtaagtgtgtcactatgaaggtgggctttgaggtctcatatatgctcaggccacacccagtgtctcagaccacttcttattgcccttgagtcaagatgtaggaatctcagctccttctctagcaccatgtctgcctgcactctgctatgttgcaccataaagataatggacaaagtccctgaaattgtaagctccttaattaaatgctctcttttataagggttgctgtggtcatggtgtctctttacagcaatagaaactctaactaagacacccttttttttgtatttttatatttgtattctttttccctttttaaaatttaaattagacacaagcttgttttacatgtcaatcccagttccctctccctcccctcctcccctcctctccccaactccctatcccattccctttctgctacccagggaaggtgaggccttctatgggaggtcttcaaagtctgtcatgtcatttggagcagagcctaggccctcccccatgtatgtagactgagagagtatactctatgtggaatgggctcccaaagtccattcgtatactagggataaatactgatccactactagaggtccatagactgcccaggcctcctaactgacaaccacattcagggggtctggttcagtcctatgctgttttcccagctatcagtctggggtccatgagctccacctcgttcaggtcagctgtttctgtgggttttccagcctggtcttgacccctttgctcatcacttcttccctctctgcaactggattccagagttcagctcagtgtttagctgtgggtgtctgcctctgcttccatcagctactggatgaggactctaggatggcatataagatagtcatcaatctcattatcagagaagggaatttaaggaagcctctcctattgcttagattcttagtaggtgtcatccttatagatctctggacatttccctagtgccagatttatctttaaacatataatggctccctctattatgtcatctcttttctttttttctttttcttttttggttttttgagacagggtttctctgtgtagcattggagcctatcctggcactcgctctggagaccaggctggcctcgaactcacagagatctgcctgcctctgcctcctgagtgctgggattaaaggcgtgcactttctttctccctcatgtccttctctcccctcctcttctcctcttctctttctcctaactccctctcccctcccccatgctcccaatttgctcaggagatcttcttctccaggggaccatgtatgtctccttgttacctagcttctctggaggtatggattgtaggctggtaatcctttgctctannnnnnnnnnnnnnnnnnnnnnnnnnnnnnnnnnnnnnnnnnnnnnnnnttttttttctgagtagtactccattgtgtaaatgtaccacattttctctatccattcttcagttgaggggcatctaggttgcttccaggttctggctattacaaataatgctgctatgaacatggttgaacagatgtccttgttatatgaatgtgcttctttggggtgtatgcctaagagtggaattgctggatcttgaggtagactaattcccattttcctgaggaagtaccatcctgaattccaaagtggccacacaagttctcacccccaccagcaatggagaagcgttcccctttctccacatcctctccagcacaaactgtcattggtgtttttgatttagccattctgacaggtgtaagatggtatctcagagttgttttgatttgtatttccctgatgacttaaggatgttgagtaatttccaaggctgaaattatgtctctcagaacatgacatgattggactcaggtgttattccaaacttgctaaggagctggattttcaatatttcttattctcacttcaaatggaactctgtaagtctctatttcaagtctcatagagtaacttgctcttataggtcagcaaatttagatactcagagtccttcataaacaccaaagtctggaactatgcctctaaggaaacttgaaaggagctagagagatggcttggtggttaagaccacttgctgctcttctagaggactcaggtttgatttccagaacccacacagtggcccacactgtctgtaactccagttcaggggatctggtgccctcttctgatctatgtgggcaccagatactcacttgatacacagacacatatgtagataaaatgactatataaacagaaaataaatgaataattaaacctcacaaaaccttgagtgatgtcatcttcctggcccaaagagggagggacctctttgaatatttggttttacatgggcatattaaaagttgccatgtgtttaagtgtgagatttctgaacttcgcatgccaggataaccttgctttgaaagggagagttgtttggggattttctttcaattcttagatttattcaattattttatatgagactgttttgcctgtgtaagactgtatgtctgtgcataaggtgcatgcatggtgcctaagaggtcagaagaaggagttagattccccagaactggagttaacagatgatttcgaaccaccatgtgggagcagggaacccaacctgagtcctctgcaaaagcaacaggtgctcttaactgccgaacaatcttcctcatcctgttttgggattttaaattccagaagttttttttttttttttttttttttttttttttttttttttttnnnnnnnnnntgaagctctggctgtcctggaactctctgtgtggaccaggctggcctttaactcacatagatccacctccctctgcctcatgaggtacatgctaccacacctggtcaatcctagtgttcttgaagaaaggcttctgtagttccttggttcagtgactctcaggcgatgactagtgtctctaatggaggatcctaaggcttttttttttcccttttagatattggatttccctgaagcacttaaaaagaattccacaaccaggttacatctaatacacctttagtgttcaaggcaagttccaggtctcaagatgtccaaaataaccctatattatcttttttcatagctaaattcggacgccacttcaagtggctggacaactttcccttacaggggtgttgtgtacatgtatgcacgaatatgtgtgtgtctttgtgtgtgtgtacttatgtgtacaagtatgtgcacatgtatgtggagggtaacctggattgtctttccttagacatcataatcatacctgtttttttttttttttttttaagacaagtctcttatgggcctggaacttgccaactaggctagactgattggctagcaagccccaaggatgaacctatttctgcttccctagggttgggattacaactgatgtcactaagtctggcttttttaaaaccatggatcctggggtttgaactcagttcccccatgcttgcaaatcaaacactttactatcttcccagccccacaagatgctttgaaaaagaatttaagaaacactgtctttagtaggaggatttaagacccactgattacagaatcaaatggatctcacaaaccacttggtggcagtcagctctcggtatctgcagcaaagatctgaactggaagacttttttttttttttttttttttttttttcttttttctttttaagaggcctgttttcttttgtggctccattgatcatcctgaataaacattgttcagagataaggaagtttcgcccctgacacactcagaatgtcacaatcgagtgcaaaaatatcatcggttctatagaagcgtcttttgactttctttaaaaatttttttcatcaaatgcttttctcaccttctgtttatttaaaggacccgtgatatacctacacatacatttatttatttagtgtgtgtgcatttgtgatggagggaagtgtagctggaggtcagaggacaactggcaacactcagttctcttcacgaaccatgtggttcctgggggtggaattcaggttgtcagccctggccgcaggtgtctttccccactgacccatcttgctggtccctaaaatataatttcatactaattgtaagtggctagattaggtactggaattatttcagccgaaaatttgactttggtggctaagaatccaataggctcattatgttgtaagtgaatctagtgctaacgacagccctggtgacagtgacagttactggttatttacaacatgcaagtccagcccagagattgtcaccaactggctataaaagctgaattcggccacacaaactccctgagctgtgatctctcatttgaaaaggattagaccaggcagatatatcatagggtctttctttctttaacaaaactataaatgtaaactaataacttttctaagtatatccctgggaaataacccagacatgtaacttctagtgcaggggtttctttagaacaggtgtggtcgatcagacaccatgtatcagaattctctgaaggttgtatacctgtaccacgtgttggtggtgaaaggaactttagtctgttctgaaatcagaaaggaagccatcatgtcttctttgtcttgagaatcaagcttcaggccattgctgggaccctgtgatgcagcctggaggctcattttactgctgagtatgtcactcttccctatggaccatgcctccatgtaaggagacgcaaacaaggagatgacctcatgcagcggctggcggtaatttcactctcaaccctgccatcaattgctttgaattctctccaacttgctaagtctttgaggcagttgcttgttgtgcatgggtggccttcagaggatgccagggagttttgtgtgactacacttgggaatgttcgtcccaagctacaagcagctaattactcaggaggaagagacaattcattcagtggtgtaactgttagagtgcccatgcatctgcaaatctctgacccatgacctacgaaccactctaattaaacctgctgagtcacaagcacatatacacaaagacatgaaagtagaaggcagaatagttgagaagaataattatcattgtggcaggaggacaagggacaataatggggtaaatatgatcgaaatgcattgtatatgtgtggaaatgtaataacatcattaaacattattttaaaagattatgtgtattaatgtcttgcctgcatgtatctgtgtgcgctacgtgcatacctggtacctgtagaggtcataggggtgttggatgccccagaactaaaggtacagatggttgtgagctaccatgtggatgctgagtgagacctctgtaagagtatccagaggcacctctctaactccactatgttcaatttatataagttcacacaacattaataatgtctgttaatcttgataccagagcatcctatgattgggtggaaagtgttgaaaatgacactcctgcacattgacagaaaatctgtgactaaaatgagccttcatggttactacaatccaagcctttgcatttcctccaaatccagaagccgaaaccccctgggggagggactaggaggtcagacccttaagtgattaggtcttcaggaaagggatttcatgaatgagattagcatccttataaaagaagttcaggagagtttgttttccctttctacactgtgaagacttaacaagaaagagtcatctataaacaagaaagcactggaactgaatctgtcttggcatcggtcttcccacactttagagctatgagaaataaagttgtttataatttacttttatattttgacagtaatctgaatcaactaagaaaatggtcaaaagactaacactgggaacaaggcaaggacatttatattttctactgcaacttaatactgcactggaggtcccagacagtatgataggacaagaaaaaaaacaattaaagctatgcacactgacaagcagaagtgaagttttccttatccacagatggcttcaaaatatacaaagaatcctgaacattgtataaaaaatataataaagcaagactcaactgcaaatagccaatttaactaggtttccaagtgaaaggtcaatataccatgatcattaatggaccataaagataaagtgtaacacttcaaaaggtttgcaagaaaacacactaaaaccttccctgtctgggattaggtgaagaattcttacaggtgacatcaaagatgcaagaagaaagtgaaagttatggaaaactggatttcacagaaatttaaattttcatgtttaaaggtcctcatcaagaaatcgaaaagacagcccacaaaatatttgtttcaggagaaaatgaccacaaatcaggcatttgacaaaagccttacctccaaaatccaggaaggatttttccaatgcaacagagaaagataaataaaccagttaagcggggaacaaaagatgtgagtgagaacttaaggagaaaagaaacatggaggtcaaatgatcctgggcagacgcccattagtcaaattccacgagagccacagtgacaccaaggcccgttaggccagccatagtgaaatgatggacaacgagccgtacagttcgtgtccgttagcaatggaacattatttggtcagtcaggaatgaagtactgacatgtagatgaacctagaaattctgctgagcagaggaaaccaaacacacactgtatatatttcagtatacaaaatgttcagaacagaccaaaccatggggacagaaggggggattactgggaatggctataatccagtgcaagtgactttatgcaacaagtacccatcacaaatatggaaccagcatacagatattgcttgacaaatggtatgtttgcaatactgagtgcttcagggtcagttagggtcagttggtaaataatttaatttcctggaaaaatctgttgatgtgggataatgctcttgtacacagtaaagatttgtcacgtgtattgatttaataaaatgcttattggccagtagccaggcaggaagtataggtggggctgccagaccaggagaattctgggaggaggaaggcatgcagaggaagcaagatgagaatgccttactgagaaaaggtaccaaaccatgtgactaaaaatagataagaattatggtttaatttaagttgtaagagcttggtagtaataagcctgggcaataggccaaacagtttataattaatataagcctctgtgtttatttgggactaaaggacttcaggactgggtgggacagaaacttccatccattctgttgaagatttctgtaaaccatcacttaaacacatttcccacgtaatgcttttctgtgccgtccaacaaatacagagcaaagctgttagggatagcattcaacatgctcgaagagggacagtcagacatcaggcaggcatagatagatgcacaacagatagactacagacaagctacagacagatggaagacacagggagagaagtcgagaattcaaacccaagaagctgtgatgaactttccctaacgctccatgacacgatgcattttggtgcctctgaaggtatctttaacattttaaccaatgtattttggtgcctcatgtgaggaatctctaatacatttaatagatgcatatcaagacaccttagagaggtcttaaaaattaaagggaccctgctatctgtgacagtgtcacttaaggaagttggagcccacataaatggactacgctgaagcttgaaaacggtaaagttcccattacttaaaaacctgatgagaacttgttagaatctaagatgcttctccattaggaaagaggcatctgggtgagctggatgtgtactcaccccagtgacctgcacagagctatcttcttttgaagagactgagagactaggtacttttctggtcaccatggagatcaagccagaggccagcttcctccatcctggtccatggatgaacctgctgctgagcagagatttacagaggaaccatttgaaactatgacatctgcacagccctgaaacctggcaagctacaagctggactccagttctgttcaataaatgtagcacgagttctaataggtctccataataaaaacaccggagtcagatatgggggtgaaagcgtaaaggtcagagaagcagagcaccagagctcttacctctatgaaatcctcagactgagtagagagtaaatcagggagcacatggttgaggcacatttccaaggagcctctgacaagccccatggagattgaccatgtctcattcacaggctgtgatgaccccagttaccgatatgattgcttctgacaactcgacactagattctgcatctcctgcacatttgcgaccctaatcagccttgcttagcaaagttttaaagatgccttttaaagcttggagtggcagagcacccctgtaaggctagggatgagaaagagtagcctgggttacatggcagaatcccatcacaaacaacacccccaactaaaccaaaccaaccaaccaaacaggccacctaactagagcaactgacccagttgtgagtagggggaacgatcatctctacagcactcacatgtctttccctgtgactcattcattagaaacaggaggatgagaggcagtaagaaccttttctcacctctccacctctctccacgtctctccttgaatcaggtcacaaaaccaggaataggactctctgatatcccctgaagactttcctgtgatggatatcctgcctacatgtggaggaaggaggaagctgtgtgagaaaaatcaaagcttcgggccttactaggcattcctactcttgttatcattaaatcatcattttgtcctatagtgttaggttctaacactatatccccgcagagctatgcataaaagtagagatttctttctcatgggtcttcatttccttatgatgctcccaaattcacagaacccaaatgtctgtgagctgatgaataaagcatggtatatccatacaacagaatattatttaactgtgaagaaggatgaggtattgaggcatgctacaaggagaggggatctttgtgtgtgtgtgtgtgtgtgtgtgtgtgtgtgtaatattactttattttgttttttgagatagggtttctctgtgtagttttgtagaccaggccggccttgaactcacaggctgcctctgcctcccactcccgattaaaggcatgcaccaccactgactggcaaagaagagggaatcttgaaaacacactaagcaaaagaagtcagctccatgcaacagtatttcctatattctatttagatgaatttctaagaataggcaaatctatagacagaagatagtttagtgataaacttatgttatatggggttgagggtaaataggatgattagtggctagtgtgggatcttttggggaggtaaatttgtgttttgggactagacacagaagtagttgcagagttctgggactgcttgaacagtcattgctttctagacttcaattggtgaactgtgtaacatgtgaacaataccacaataaagctatagaaataaaaaggaggagtcagtaggatggtcactgtcacaaaacaaatgtgaaaccagtgatgacctaagaccctaatgatgagaaagtaacaagttctgtctgggagggataagagaaatttaattagaagtctgggtgggatgtgaaatggtcactaaggaagatggtatggtggttcttcaaaatttagaagtagaatcatcaaagtagggatctgaaaaatgctttacacctatgctcatagtattattattggctttggccaaagcagcccaggcttccgatgccaaatgaatggataaagagaatgtgtgtgtgcataagtgagatagtatgtagccttaaaaaggaagggaattccaatgtatactgcagtgtggttgaaccttgagggcactgtgaaaagtaaaacaagctgtcaccaaagggtgaataaatacatgcaacaccctttatatgtatgcatttgattttactacacacacacacacacacacacacacaaaaaaaaaaaaaaaaaaaaannnnnnnnnnnnnnnnnnnnnnnnnnnnnnnnnnnnnnnnnnnnnnnnnnnnnnnnnntttttttttacaaacacacaaacaccacaaaacaaaaaaaaaaaaaaaaaaaaaaacccttaaaaggcttgcatttggagtttacattggagaacaaacttgggatctgggaggtcagtggtctgggttttatcttaggggctctgtggccatgggcaggtcatacaagccttctgttgctgtgtctttattattaccaggacatggtgtttttgtacctcacagggttgcaatcagagcacttgaaataaatgtcaggtgactattgatgtctgtcaggtgtggtgtctttagaggtggagccaagagtatagatgtgaacttggggataccctgccagctcagtgtcagtgaaacaagacaagtttcatgaataagcataagacagaccccacccatgaaagttatgttaactatgtaaagacgtgttatatttgcttatgctgtgggatgttactctgtaaaggtgtaagcttcgtttatttctgctgcatttgtttaattatgtaaagatgtgttgcatttgtttcaccttgcctgcctaaggcacctgattggtctcataaagagctgactggccaatagcaaggcaggagaaaggataggtgggactgccgggcagagacaataaataggagaataatctatgacagaaggagagacggaaggatatgcctggggcaggctgggcagtcaccagcctgacaaacatgagaagcaataaaagtaagatatacagaagaaaagaaaggtaaaaaatctgaggcaaaaggtagataaagagaaacaggttaatttaagttaaaagatgtagcctaagctagtccgagcattcataactagtaagtctctgtgtcatgatttgggagctggttggtggcccaaaagaaaaagcctggtacagttatgatttacccaatttatttaatttctaaaaagattttctgaaaatgttcttaaaatggaggcttcccagtaggatattatttatttcaaaagttttaatttgtttaaccatcaggctatggtccagctctggaaccctcttggcattctgtgagctggcaaaccttggccggatcttagcagccaagtcccctctttcgaaagccccagggggccctggcctcctgaactgggttctggtggtgctcacactgccctcctggctggctggagttcatgtttcatctgcatatgcttccctttgttgtcacccaggtgaacttctgagctatgtaaagaacacccaatcttgtcctgatcaggacacccattgcctccccatgcagcctacactgtggcttccaggtcatcccttcctgccaccatggtccccttagacatcagcatggcacatggcatctctttccctgccttaccccaggaggacacctccacccttccctgaacacatgcaactgctttaggaaccccctccaggatagtccccattgcatgacatcatatcacaaaacaatcaactttagaaaaggcagatcatgcagcatgcactagaatttcagatcaaccctctcaaacttcacaaagcttggctagatggcgatggtgcacagctgtgatcctagcaacaaggaggctgaggctggggaggattgagagttgaatgctagcctgggatatgtgatgaaatcctgtgtcaaaaggtgaggggaagaagaaggaagaggaagaaaggggagaggaggaagagaaggaggcagagggaagaaaagggaggaggaggagggtgaggaggaataaggagaaagaggaagaagaggaagagggtgaggaagggggaagggaagagagaaggggaaggaggaagagaagaagtataggaagaaacatgaaagggaggcacaagtgttgtcaagtaaagattttaatgattattttatttaatcttaattttgtcatgtaaggatgccaatgaataaagcaaactatatcgtttacctttattatcatttcataagcgaaaggacggcactagtagcactaaattgaaacagacacaatttcataatttagaaactgcataaattagctttatgaagaattcatgacattgtctgctaattttcatttggatacagatgagcagaaccctgtcaaagaccaacagtccacagccatccattccttcaaacaacattcggggcagatcagagtgtggcagtaggccaaatcccaattatttcccaaggtaaccagccagattggcattctttgggccacttttgctaaattaggtttctgatcacatggcaacccaccctgctgatgttaaccttggcaaaaactatgttccttcttaattccctttttttctacaactcccagacagcagaggtcaacacaaagatacagaatggaccccacatgccagttgtgacatttctcatgcctcatctcaagaaagaaacaccagagctgcctcttcatggaggtccctatccatactttttcattttatgttaataaatatctttagaaagtttaatcttcaacagaaaaccacaaagaattacttaaaaaaaactcccatgtttcaagtctctgcacttttggagacccatttataagctggtgactatatttagtgtttccttttcctctaaatatttatgacaactctctgtctgcgttctgttagtctaaattctgttccaagtcgtgacatctgttttcgaaaatttgactttctccctgttccaacctacacatgttcttattagtttagaattttcttcctctctccttttaaagatctattttatttttaactatgtgtatatgtgcaggtctctgtgtggagtggcagaagatgagaggcatgggattccctgaacctggagttgttagcttccccattggagccatctctccaagagttctgaagtttctctttaatgctgaagtgagtgaattgttttataacctgtgggtgtttaatcagaatctattacttatctgatgtttcttgctgtttccactttttcaaccataagacactttagtcacttgacatatagctaaatcctgaggaaaagatctgaaattttatgtctccctaaattaaaattagggccccagtttgtggagtgaacatgccatatgtctgcctgttcacaaaggacacctgcaaaatggctcttgtcaacagacagatcattctcatttttttgccaataaaagtcttgaccctgggaccctacagagagatcttggatcattttctgtggctataacagaatacaacagattgagtaatatataatgtgaacatcttctcacagttctggaggccccaaagacagatacaatggggccagcatcttgttgccccttttgctgttccataatatggcagcagtggtctttagcttgcctctgttccttgtctggcaaagttacagatttcactatgacttcataaaaaactaattactttgcaaacaccctgccccagagtttgaccaatctgtgaattttgggctgaatttttggagctatgaatctggagccccagcccatggaggtgccacacacttgtgttgtctctgcaaacctccatagggtgctgtctcctaggccattctaaatcttgttaccttgacaataaagattagacgtcacagcagccaggagatgatggcttactctgcactcactcttatctataatctgctgacccactcatggaccagagcctctaaaaccacagaagtgaggtcccacctggggtccttagtctcattagtaaaagaatttaagaacactcacgggccagagagaagactcagcagttaagagcacttgctgaccttccagaacagggttcagttctcagcacccacattggtggctcacaactgcctgtaaccccagctctagggcatctagcaccttctggcctcctgggaacacacacacacacacacacacacacacacacacacacacttctcacagtgaattctaaggaacacacacagttcacatacacatacatgttcacatacccatacatagagacacacatcattttcttttaaaaggactcagaagttcatggacaattttgccagagtttaaaagaatccctatcctgaacaaaccaagctgtaaattacagcaactgtgtggaggacttaaggagaaggccatgctttctgaactatagacacatggcttttaagcagctgtatggcagggagggagggaggcttagaacagaggacggaagcctagagtatcagaggaagcatacctaggtcctggccagcacccaaaagaacaagacagaaaacagaaaatggaaatgttatgcatttctgactcaggcttcagaaaggtggacaaacctagcagagccttcttggtggtttgtagggactgtgctggattggggaggagcatgggattctgggaagggaagtacagaagaataatttctcctttctcctctctcttcagcatagccaaggtaagccctaagggatgtgtgctcccccccccatccccacattgatctggcccaactggactgttaggtctctagttctattttcttgaccagaaggatttatttttcttgcttgggcttttactgctattctttaaactgaccaaattggcctatgggcatatctgtggggattttcttgataattgatataggacagcccagctcactgtggacaacaccattccctggacaggtggtgctgggctgtgtaagaaatctagctgagcatgaacctgtgtgcaagccagcaaagatttttcctccatggtttctgcttgagcttctgcctcagttcctgctctgacttcccttagtgatggaccttgaccttataagctgaaataaaccctttgtcccctaaattgcttttgaactgaatgttttatcatagcagcagagatgaaactagaagcagaaggatgatagtatcttccccatggcctgaatgctgggcttgaatttccctttttggcttgggaggttgtagaaaagcattctcaggagcaccctttctctcagcactcttgctacagtctccaaggtgaccaagtgtgagccacagatgtggctaaatagttcataggagaacattggcccttctcagcctacaaattatcacagattagtcacccagactgggtgtcctggaggctcctttatctgtcttcctcatagttcagcttccaaagcttggcaaacagccagggaagcaaagatagatgcagattaacaggcagatgcaaatgtataaactggaagacccagactgtcatgcagagacacagattaaagattaataatctaggatgctagattattcatgacacagctaaatgcttgtgcctctggcggagacccaggtttagatccacacaggtgagcacaagccacacccgtctcaaatgcagagacagggagggagccacagctttctctgtagtcccaaagtgactggacaaagctgagttggaggaaatgatggcttggaagtttccatagcagggtgccatgcctggggctcattacctgatttagctccaagctttattgacaaaatttaaatgagaaagtagtagtagacccctgaaagccaaaaataaacctgtacactccaggttattttagacaattccaaataacgcttttctgagtccaaacttttcttttctctgagagattgcaatgaaggcaaattgaaatcagattacttacatttgcaaacacacctcattttttctatcattattgactaacacatagaaaacaggctattttgctttgcaatctgaaataaataaggaaaaactactccacagaccatagtttgcttacttgacaaaggtctaaatactttaaaaactggatttcccaaaggcagccaggtatttaccacagtcatacaaatcttttccaacaataaggtgctaattcctggcttacttcaagccacatgaaagaaacagtaaacccagaaagttgccattttaatggttaaaagaggagataaagacatatttgtgtaacggcttctgggaaaggtactttcatggtggacttgattcctgccatccaactgtattcatgcaaaacaaatcaaaacatgctgtatctctttgggcaaagcccagtgtcttactattgagatgcatggggataaaggtataatagattattttacatctgaagaagtgtctaagaagctccttgtaggggctggagaggtagttcagctgacagtgcttgcccagcctgcagaaagttcagggctcaattcccagtcctgcctaagatgggcatggtgggagggtaagaagttcaaggtcatttctcggctacaaagggagttgaagccagcccagactacaaaacctgtgtaaataaataaagcaagctactatcataggttgacacttaaaagaacaactcacttctgccaaagtaagcatgcatggggacagcttatctctacacttaagagggatcataactgatccataacttgtggcaacacagaaataaaaccacacatggcatcagaggcatagaagatgccccagaaagagacttctatgaataagcatctaattttctggaaaactttattttttgaggtatgtgtctatgtctgtatccatctagggtatatgcacatgaatacagttggccacagagaccagaggaggtttgttagaaagagttctggatgggcttaagtgatggcttagtggttaagagaatttgttgctattgaagaagacccaggatcaattcccagtacccacatggtggctctcaaccatctgtaacttcagttccagggcatctgatgcttccttctgatctccatgggtaccagtctcatgggcaggctaaacatttatacacacaaaggaaaataacaaatcttaaaaaatactttgaaaatcctttacttaaaaaaagaaaaagaaagagtatctgtagctacagacaactgtgagccacctgatgtgggtgctgggaactgacctggaccctttgtaaaagcagcaagtgctcttagccactgagccatgctgccaggaaactttacatgatcgatatgaagcttcaagacatgataaagaggcaatgagaactgaatacattgtgagggttttttcatagaaaattccttcaagatggtagaaacaaagatgcttgactaaaagcaaaggcaaagaataaaactaacacttggaaggcactgagctattaaacacacacacacacacacacacacacacacacacacacacgagagagagagacagagagagagaaaaagaaacaatgaatttcccctccctgtcaaataaggttcatagttttctttgtataatgtctgtatatagatgattagagtcaactgagtaaatttaacagtgtcaaaagtaattttagtagatttgaaagagaagagtttttccagtggtcctggaaggctgatttacaaaacagtcctgtcattgggtcatttcaaattccaaatactggagtcctgattttaggaattcactcctgccagcctggctgctttagatgcgtgaccttcacaaacactgctggtcagtggtgtttggaggcagatgggctgcaacatggaaatcaagacttgaataaaaatgcagttggaagtacaaatatttattagcaaacaagtacaaagtgaggcttgcaccatctgttcttgcaagctcagagagcccctgctctgtctaatggctgtcctcccccgccttgcatagaaggctgcctgagcaagagtatgcagctccggggaggaatgattcctctttcagccacactgggcttacagcctttgggaggtgtggaaaccagggtagggttcagatcagcacagtgaggctggtgagctaatgggctgaccagcctcagctctcttccgtccaaggatgatggtattcgcacaaccttttgagataactccccagcttggctactaccaaattaactggagtaaaattacctcctgacattcctcaccctgaataaacctccagtaccagtattttgacagcagtttggaaatactgtggcagcccttgagggcatggactccaggtaagctatgtttatacaaatcaactggctctagatgtgatttcaattcaacacacatggttgtaactcagtgttagcgctgataagttttaaatggtcacgcagaccatatagattagttctgtggtttttgtcctttcctatttacttttgtgcctcgtgttttctttctgagccatctgtcaaattatgtggcttccattctgcaaagattcacaggtgaacttgaaaacttaggagagaaacagaaaactgagttgcatatgatgtcaccttggttttatgtgggaaggaactgtcactgaacatgtgatgaataagctcttgcaggtgaaataccatctctgcatacccctctttgtgtctagcttgtgtttactctatgtcaagatgtattttatggagacaaagccaaacatgcacagtcctaatcacagcctttgctgtcaggactggcaagtgatgtttctgccctctggaaactggaatgtagaagaaaaactacaggaatctcaggctctcatcttactgttgccttgacgagttctccataacttaaacaaaaacttccaaaggaatccttatttaagtgatgttgttaaggacacaattctgtgtagattcccttgttaccaaattctttttatctttaaaggtttattttattttatgtgtgtgtgctttcttgactatatgtgcactgtgtgagtgcagtgccctcagaggccagaagagggtgttctatccctcagaactggagttaccactcactgtggatgctaggaatgaatgtcagtcctctgtaagagcagcaagtgctcagatctgcagaaccttctctccagctctggatgttgttattcttgaaggcaggaaggaggaaaagtagacataataattagtgtctggagggacccattactgtgtctacactttcctgctcacgtttgtctaagcccacacttcccagagggctctgaagtgcatctgatgacaaaattcccgttctgtgtaaacaactctccagggtggttaatgtgatttatggactcagttgtatagagagacacctgggatcttagcgagtcacacttcttgggtatgcagacggtgacagctctgacccaaggaatctattaacagttttgaatagacgattggaaagtgggtggaactggatagaggaagtatgtcattggggtgtgacctttgaggttatagcttcccacagtcccttcctatcacggctctactctgcttcctgacctttcctctacactttgcaactgctgtgatgcttctgcctcgtcacaggcccaaatcaacagaaccaagcaaccatgaaccaaacgtctgaaaccgcaagccaaagaaaatccctgctgctttaagatgcttccatcgggcttctgtcacagtaatgtacaaacagtaacacactcccattgtgctattacaaggctggaacatactttgagaaatgccggtaagaaatgattttagtgtaaatgaggcttgaaagaaaagtttatgtctgtggaaatgctcgtttggtgaagtgctggtcttgcaagcacaggggtgggggatccccagcatccatgtaaaaaaacaaaacaaaacaaaaccccccaaaaatcaggcacaatggttctataatcccaggtggaggccctggagcttactggccaggcagtctgactgaaccaaagagctctaggttttgtgggagagcaaatgaagagacactgggtgctttactttcataggttgtagtgagatatccaccccgcccgcatctgatgcactgaccacgctcatttaggctgtgtcagtgcatctgatgcactgaccacgctcatttaggcgtggtcacaggtggggatgtgatgagggaaggctaggtctggggtcctggatctcagcttgctctcttgtttcctgttgggtgtcggagagcagcctgggtgtggatccttggagctggaacttgcaggtcatcagtttcttatgtaagtgacttctccccgaataaaattaaccacgatttaaccaagtcccttaatcttaatctgtgccactacagtaggtgctttaggtcttgtcattaggcctacagagaagcactaaggactagtcatgtccatgtctagtaagtacattgcgtactgagctggctagttttatatcatgtcagcttgacacaagctagtgttatctgagaagagggagccacagttgaggaaatgcctccgtaagactagcctgtgggcatgtctgtgggatattgtcttgattaatgattgatgtgggagggcccatcctacagtgggcatggccaatccaggcaggtggtcctgagttgtatcagaaaacaggctgagcaagtcagtaagcagcagctcgtcctccaggttcctgctcttgagttcctgccatgacttcctcagcaatgggctggtaactggaagtagaagatgaaattaaccctttcctttccaagtttcttttggtcgtggtttttatcacagtggcagaaaccctaaagaagacagaaattggtacaaggtcatagaatatgtctgtgacagctccggccatgtattttattttccaagggttatggtggcatttgaagtttgggctggaaaaaagctgttgaatgttttgagttcagtgttcagagcttagggggccattctgtggatgcacagaagataaaaggcttgagagaatttctcatgatcaagatctgacttgtcaagtttcaaagggaagttagagaaaccctgaaagactatccatggcgtgaatattttgagaattaagaatttgtgattctggtcagctggtgctgaagcatcagctgtgattaacaggagatcaaatccactgggacagttaactgatgccggtcagcgggatctgagaaattagcagggattagcaagagaccttcgtcaaggaggtgaaatcttctggggagcgttgccttggagtcagcacacagtagttgcattagaggcggctgaggctgctccttattgtagcagttgataatgtgcaagagattcccaggtggtactagttttaaaggaataaagggatcatggaaagcagctggggtgtggtatggtgagaaggttaaataggccatggtgagagagactgaggcttggcaccacatggcagggtgtccttggagaaggtccaggaagaagctgtcggtgaaggtgcaacctaggtacagtgaacacccagcattttggagaatccagtgtcatctcatggccaccaaggacagctgcagctgtggtgtggagctgatctaagcctatgagacaagctgtctgtgctgtgaatggcagaaccagatatgtgcagatgtccaaaccctttggagctcagaaaatcaacagtggatcccagacatcaaacaccaatggagttcacattgctggatgtggttttgtgttgacttgactgtgagtgccctgaatcgtcttctggcacaagaaggtatgtgacttatttctgatttttaatgggagaccacagttgagagagactggtgttttggagagactttatatattttagagctgttttggatactttggagagggtttgaaattggagaaactaagtgtcttaaagagatgacattttttaaaggggtagaagttttaaagactgcactacagccaggcttgatggtacgtgtctataatcccagcactcaggaggcagaggcaggtggatctctgagtttgaggccagcctggactacagaacgagtcccagtacagcttgggttacacagagaaaccctgtctcaaacaaaacaagcaaacaaaaaaagactgggacttttaaaagttggaatgttttataatgtggtattaatattaacttgccatcttggggacaaatgagaaaggaaatgttctagttgaataatgatgtgtttgtgtgtcaaattgacaaggtgtcaattgtgctggttagttttatgtcaatttgacacaaatagagttacctgaaaatcgggagccacaactgagaaatattgggctgtaggcaagtctgtggggtctcttgattaatgattgatgtgggagggcccatcccacagtggtggtcccgagtagtgtaagaaagcagattaagtagtgtggagcaggtcagtaagccattccttcatggtttctgttttagttcctgcctccaggttcatgctatgttttgagttcctgccaacactcccttctgcaaggaactgttaactgaactgttaaccgtaagtgtaagataaaataaacttccccagtcaaggactattttgaggttgccttctctatctaagcttggtagagcagaacagctcttggctgcttgtacagatactcaaggttttcttgtggttttcacctttaagcatccttccctcatcccccctttacttggtgcacttctgatttgggcagttataatctgaattaagcctagtggtcttttcctggggggtcatgactccataaaactttctctactaaaatttcagctctaataggatggtttgatgtcattctgcccttctgttacatttgtacatattatttcaactaattaaacataagcaacacaattggaagtatgtcgttagtattgtgtttagaaaaggaatttgtgtcatgggatccaaactgagggaggggagggcagtgggctcattttcaccatcatgtatatatttggatcatatctggatcttgaaattcatggttgggcttccttccttcttgctttcctgacacttgtaaagatgtgttcctggagttgatttgtgtgtctttgaggatgatgtgaccatgaaaacgatcatgaccagattctgtgaacaactggtgtatatacagtgctctcccaacatactgtgagggctactgtgttgccaccatcccaaggcatgacatacccttctctggcctcacagcatggtacagaaaggctggggagtacacacagctggccagttgcagagcctggcctctgttcagatctaggctgttttcttcactcctagcctcccctccttccagtgtgaggacatctgacctagatcttgcattgaggcagttctttccctatgtacaccaggtctcaccaaagagtgagctggtgtaatcgatctatctggggacactggtagatgaagtctgtttctgcagacctagaagggctcttggccctcgatccagttcctttactctgtaaccaaggaaactcgaatccccagaaaccatacatacactgttgggaagagagaaatcagggctacagaagattggcattcagagggactcaaggaacaggaaggaaccatgtgggtgaatggatatggctgtctgttcttgggatgtgatgtgactagccaccttgagtccttgccctgacttccctttaacaatgaactatataacccagaatatgagtggaaatgagctttttcttccctaacttgctttttgtcaggatattttatcacagcaacagaattgaaagctaggactgtagccagagaggggctccgcagggaatcagttgtaaattgacatactggattgtgaattggggaggggacgtttctagaactttcttaggaacgcgtgtctccttcctttctgaagcaaaagaagaaaggcagcagcaggcatgctaagcattcagaggtagtatctggaaagtgtgaatggaaaaccaccccacagtccctaagccgaagactgcagcagtggctctgaggtgatgtgtacagtgtgtctgccagtaaatcaccggaaagaaggaacgagtgttgagaaaagatgttatctcctgggcatggggagttattgagcatctgagtcagggagcagggttttgtgggaaggcaatttcctgggtcctctcccaaggacaatgaatcacagctgagacctgccacactagggaggaaggccagagggtgacgtgtccagaaaactggaagtgactgccaagcactcaggcaagactgtgtggacactttctggagccccgtcagtgctccactcagcaccaagtgtgagatggccctgcttgctcttagggactcaaactagttggtgtttttttctccccacattctcatctaactccagtcctattctgccccttgggaatgcccccacataggcttcttcctaaatcatacccacctatcactgaggagtagaagccgaagaggtgggtagttagtgctaattaaaagcagatcaaaacttttttgagacagggtctttctgtgcagctttatggccttgagttgatgagagctccctctgtcttggccttgaagtgctgagatgacaggtgtgagcatggtatctagctgttggtgttaattttaagtctcctctgtgaaggctcagcagccagtgacaagtgggaagacatcctcaacagggattgtgtcactgcagcctggttactgcaggctgccttgtgcaggggtcagggctgtgagtccaggagagctgagacatggttggggcaattccggaccctttctcgcccgttttcctcagtggatggttactgcatggggtaaacagggaggtgtgggcatgggagtgtgcagatggtctgtcctagcacttcccacattcccagtgaaagagaaagccaagccatcatctgagagtgacagggaaacgggagcttgagatgaaagacaatagtgtgacacagctgtctatagaggggggggctgcagcagtggcaggggtccccctgaagcaggcggctgtgggtttaaggagggatcccacatagaagagaagtagaagctggtttcgatgtgttgctgtgataaataccatgaccagaggcagcaactcggggaggaaaatgctgatgtttccgggtcacagtcaactgttgcaatcagggcaggaactcaaggcagcactgcttgctgttccatgcagatcacctccaactgtggaactcacagctgaggaagtagagcaggaaccatggaggatgctgattgtaggctggtgcatgcttatctagctttcttaagtagcccaggaccacctcctacccaggaaatgtgtggcccacaatgggctaggtcctcttacatcaattaataatcaatataacccccgtagacaggcccacaggccaacttggtctaggcaattactcaactgaagcttctccttttgaaatgactcttggctgtgccacactgataactaaggtcaaccacaacagtcattctctttaaatatgatccattttaaggcaaacctaatttttacacatacactgtcaaatctaccagaaagcttattttcaaggtcttttgatgtatacagaaatcccacgttttgagaatgacgtaagtaccaaccttagtcatagttattgaactgggaatatgacaaaagcaagttgttggtgaaagtttccaccctggcagcctggtcccacaaccgcttcaaccccaaataaatacacagatggctatattaattataaactatattaaattataaattataaaattaattataagaagcccagtagctagggcttcttattggctagctctgtcttgattgttaactcattttgtgttcttatcttactggagaagggtccggtgcatcctaccttccagttctcatttggtggctgctgtctgcctacacttcccagaattctcctcatctcctagtcctgcctatttccctgcctctattggtcacagtattcatcaatcaataagagaaacatatacacaggacaacccgaatcagcaagtggtagtaaattactcctggtatgtgtgtgtgtgtggtgggggaggatgggtagcagatagaagagccagcgaaagccaagagcagtattaggaggcctacctgggctggctcagtcccagaacagcagtctcccagaagatgtggatgggtgcagagaggctatggcagtgcccaaggcagcagtggctgaggatgggcagaccatggtaacacacagcatgattgccaagttcatgatgtggaacaagttcctgatgtggaacacgctggtataggtagcaagtgaccaaaatgaaggtccttcttatggactgagttcaggaaggggaggagagcatggagtgggtggggcgtgggaagggaaccaccacccagaagggagtgccagtggccagctggtgttcatgacactcttcactctctgagtgcaacctgattttctactctgtatattaaaacatggtgcctattccattaggctttgagagtgatatgtctggattgcaataaattcagctgcttcttcacttccctgtccatgctcttgcaggccagcggtctgccttgttagactatttacctgtaatactttctggatcaagatgagaaattaatacaataaatcatcctcttgcagcagtgggtggatagactcttaggtgattcccatggcccctgcctcccattgtccctatctttgtgtaatttccttcctagggattagctgctggtgaaagttccagctcatcatatctgtggttccacacactgtgtgaattttcttctggctggtgggctgtggactgctatgaggggttgcctttggagaagcctgctgccatgttgaaaaagagcttgtgaataaggaactgggagaaggctgtcactgatgagaatgaccttagcatagcactagtaagaagttggggcctcagtttgcagcaaggatatgaatgataccaggagctaaatgaagttagaccatcccagtcaagccttcagaccaacactaagccttgcagaggacccgactaaccatgcctggactcctaacccacagaggttgtaggtaataattgtgtactcttttcacccactaaggtttttcatttattaaacaatacatagagtaatagtactctatatttgcttttcattctctctttaagatgtgtttgggtcatggaagaaatacctgtctgatgacctttgtcagagagctgtagacctcttaagcaggctgatgaaggagatgagtgtgagtgatgctaggtgttgaataagagccagggcaggagtataaagagtttgagaccagccttctctgcatagtgagttcttgtcttagaaaataaaacaaaataatagaacaacatctcaacccaagatggggcaagcctgcctctatgtctgggaagaggccacacctcatatataaactctgcattttcaccactctctcacagctggtcactacactggtcaggcagcagttaccctcctgtgtaccagaccatcagtatgttctaggtaccgagctatgttttatggctcatattggttatgaggcatctggtgttggagaaggcctgtgcatggatgggtgggtggaaggggcaaaaggtcacttctagggcatgtgaaagccttcaagtcaccctgccaaggatattccaatgttcatatccatgcctagacatctctaattgagtcataattagacaagtcctatcttctctccaaaggatcctatccaagactctacatttgcaggcatgccccatctcaagatagccagtgaacatgtgagagaaagcctcctccaaacacatcgctcatcaataacatccagtgtttcggcttctggtggttcaggggagctacattagagagtacaagaggcaggggaactataaaaaatagaagcaacggcattaattctcaaacaatcaaagctgggccagctattttcctgatttatgttaccctttattgcaaagctgcatgccttgtccagcttaaatctgaaagagccacaagggaaactcaagtgcatctccagcctgtgcccctcctgggtataaacgaactgcacacaagaaaatagagtaagcggccctcgctgcttaaatactgtttatttctaccgtgcttacttacattccaggggggtgattattctaatcacaagcattgagagcaaattagttcatcttaaaattcattattgacaatggacttggttcaatactgaatttctaaacacatctccatatccaataaagttgaatctggcccctgtgtgtgcagagaatgaacggagtgggagtggaggtaggtgggtgagtgatggggaggccacacaggttaggagcagcctccgtctctttaaaaatgtttcattgatttttaagttggcatacagtgtaataggttttatgacggcattttcatatatatgtcattacacttcgttcttactggagcaccacacccccaaccccactaagttcccttcttctttcaaaaatctcttgttgttcccttccttcccctgctaagtccccatatacttccattgtcttctctttcctcttcctttagacctcttcctcccctctcatgcccttttttctccctctctctctctctctctctttctctctctctctctctctctctctctctctctctctctctctctctcacacacacacacacacacacacacacacacacgcatgcaggcagcagacagacaaacacacatacagacatacaggcagacacacagacatgcaggcaggcagacagacacagacacacagagacaggcacacaggcagatacacacacacacacgcacacacagtcacactcacacacagtcacactcactccctgatgtcacacccacccatggctcactctccaccagctgtgccaatctctttgctcttctggaatgttctccagaactcagggccttattctggaatgttctccagaactcagggccttggttactttcctgttagttggaatacatcctacaagtacccacatgactcgttccttcacttaatgtctctgtctaaacttctgtctaattctcagaacctcactctgtttcatgcaaaaatgggaagacagttataagtgtaagagtccatttcaggtgcttagcactctggagaaaacaccagaggtgtgagagagtgagcagtgtgtttccatgtaaaataaaatactttggtatattaactacttttttgttgttgttgttgctgctgttaccagtttctgacaaaagcaagttaagaaaggaagacagcttggatgcaggacagcacagcagcagcgtggtggtggtggtggtggtggtggtggtggaggggtttctggggatggtggggcgggaagcctggtggtggggggattcctggctatggtggggcaggaagcctgggggtggtgggattcctggctatggtggggcaggaagcctgggggtggggggattcctggctatggtggggcaggaagcctggtggtggtgggattcctggctatggcggcaggatcatgaggcttgttcatgtggtggtggggctcgggtggcttggcagaaagattaatggttacataatggtgtcaggacgtggttttatgaacttccacataaaagcttcacaaaagcttaaaaaggggattttagaagcaaaagaacagagacaaacacaacttcttggtagcagcattttctcaggtggtctgttttgcagagacaagcagaggctggaggctcctttaagagaggcttcctgactcagcataagtggcaaaaactgcaaggctctttagaggtcttgctaacaattcagtggtgtgtacaagcagctggccatggcagtgaccacatctccaagccggcagcatgctgcttgattgcagcgtagaccaaggcagtgagcacagctctcactgctggcagtaaacgtatgccctccatcttggaaagacaatgggtaaaaaatccactgctttaattttagcagtgttgtttagcagataaaagactgtgtggccagaaaaaggtaaagatttacagtaaagcagattcagatgaagaaaaacctccctctaaaggttaacagtgtatttaaaaatatatgtagacttgtgagagaaaagaaacaggataaagtaattaaagaaaagccggtggtggtggtggcacatgttggtaggatttgctgaaggaagcagaggcaagcagatctctgtgacttcaaggccagcctggtgtacagagtgaattcaagggccgccaatgttacacagagaaaccctgtctcataaaaggaaaacttaaaagtaaaagaaatagagtaatgaaaaagccacgtaaggatggaaaatccacagtctggatactatatgccataattgttgtctttaaattgtttgattgccgaggaaagagctacagctgctaaaagatatttggttatcaatgctgctaaattaatccaacctatacattttaaaaatgctttgacttcaaaatttaagtctaaggacaggctacttgggaaaagaatttctgcttttgtttacacaggaaatgaaaagctgtggattccttccagactaatatggtttgatcaagcaagaccccctgaagcaatggcccaactgattctacatccaaaacagctgagatgatgcagtcagaatccattatagaaggatttctgtgttttatcatgatccccatggtatggacatcgcccccccccccccaaccaccaggaaccagagaatgaatgacacccaaattcacaaatactgtttataaatgtttgttttcatttaaatggggttgggctctctttctctccctccctctgtggccccagccctctgcctgctacccgtggatcaggatataaagctctcatctacttctttagcaccatgcctgcctgcctaccgccatgttcccaccatgataatgatggactaactttctgaagctgtaagcaagcccccaaacaaatgctttcttagggtcagcactccgagcatctaatctcagctgccctctgagacctgaccggaactcagggagagcaagactgtctgtcctcccagaccaaaatcccacacggccaaacaggcatggtcagcgccacaggtagcctcccaggaaatcagcatgggcccatctatgaccaaggcagaaagccaacaggtagtaagcaaagcaacaatgtgaacagatgtggagccctcagatctactacctcaccaggttgtgtgtgtgtcttcattttgagtcggagcacaggggagtcattggcaatgctctcctggactttgaaagagagatgtacatatgcactgattttcttatccttctttctttttgttggtgctagcaattaaacccagggccttgtgcataccagccaaacgctctaccagctgagctgcattacttctattcttaggaatggtctgattgctctctctggacagttaggaggagatgatagccaaggaaaggtgcctcttctgctagttgacctcctgtccttatgaagcagggagggatactgatctcatttctctgacttcatggttgcagatgacggcagagaaatcaagtctgtactaaagacagtagtatgattgattcattggatgcaatttgtccttataccatttctaatttgttattggctcttagactactaaagacagcttactggagagtttacagttcagtttcctcatttcatatatgagaaagaaatctagaatcaccgataaggagactagagagatgggtcagtgggtaaagtgtttgtgccacatatatgaagacctgagttcaacccccagcacccatgtaaaaagccaagctcagtagtaaagacttgtaatctctgtgctagagagatggagatggacttctggattctagctgaaccagcaagttccatgagttcctctcccaaaaatctatgggagaatgactaacaaagacaccagacatcaactgccttcttatttatatgtgtacacaaatttaaaagacatggtttccagtttcacttctttgggctttctactgcaaatgactggatttgttttaattttgttgttgttgtttggttggttggttggcttttacttagctttctggctctttttagtgttaatttcaagttgtttcaagaacagaaaatattaccagtattgtacccagtatactcagaaagagttatgactaagtgataaaggcatcaagttaaaaaacaaaaaacaaaaaacaaaaaaaaataaatggggttggttataaatggtgatgatcacagtcaatctctttttaaaggaaaaaaggggaataggatatagaaaggaatactttgcattggtatggattttcatttattgatacaactttaaggtcaattttgtgatatgtatatgtctcctcttgtttaggtattgtgtttatacagatcttttaaaatgcaatgcataattaaatacagattgtatatagtcaggtctaatagtcaaaacttacagttatgttagttaggttttctagatatacagagatgtatttgaaatggatagatattctccaaacctttcaaagacctacagaatatatggcatttaaatggtttagggtttttcatgacagtgagacacaactgctcctggcataccaattacatcagaaagaaggatgggcagtgaagaaactcaatatggagtttgccttcaacatggcaagattagccatttgggcaaaaaaactgctcttgcctggactgtttgataaactggacatgaaggatccacaggaaagtgactgctgaacttgcaaaatgagacagtcctgaagggttcttgcttcatggagaagtctgccagatacactgtgacctataggctgaatatggatgccccaacgttacagagaaactttgggtgactgtccaggtagtgagatgtctctgtcagatgtagagtttatattatccttctgtggtctttgatggagttgaagacagacagttttctttagttattataaaaagataagctacatataagaccttagactcacaaagataaaatagatgatagaatattttctttaaatcttgctaaatgttagtgaactaaatatcataactatagttcttacttgataactgttttgttatatattttactatgtnnnnnnnnnnnnnnnnnnnnnnnnnnnnnnnnnnnnnnnnnnnnnnnnnnnnnnnnnnnnnnnnnnnnnnnnnnnnnnnnnnnnnnnnnnnnnnnnnnnnnnnnnnnnnnnnnnnnnnnnnnnnnnnnnnnnnnnnnnnnnnnnnnngggaaatgtagtaaaaagaagtcttgtgatccaggtaggaagtgacatagcaggcagactcagaatataagcagggacaagcaggaaatccctctcttcctcttcctcctactctcttctctgggctgtcaccctgtgagccttacaagagaggatgcatgccaccggcaccctggatctgataagtctttataaatacatagtttaatgattatggttgataattaagactaactagcagataagaaatcctagtcattggccagcagcattgtaattaatataagactctgtgtgttattttgggtgcccatgtggtggcggggcttggacggcttggcagaaagatttattgttacaggcaagcatggtggtggtggtggggattcctggctatggtggggcaggcaagcatggcagtggggggattcctggctatggtgacaggatcatgaggcttgttcacatctgcgcaggtcaggaagagagagaaatgagctcacatgccaatggcagtctcatttgccacccccctttatccagtcctgaactctaacctaggcatttcttagttcaatcaacttgacaatcgaaattaatcatcatgaatccatcatgaatgtattcaaacatgtctcatcaatctacaattgaaatgaaaattttgagggaagataccacagatttctaaaacaaaagcataaaagcaaagcctggggcaggggcaagcaaagaaaaccaacggccagagccccatagcttctcttttctctgaaggaattcagatactaggctacaaacaggtcacactcttgtagacacatgtccaatttccaaatgggtttaaaatttaagaaaaaaatttgtatttcctaaaaaaaataataatgctttaaataactttaattatctactgtctttgcctatgagtgggccatattttttctaatggtgtggtatccacaggcataaaatatattttcagtaggaaagatttcaccatcattatgtacaggaagaaaatggtgtgaggtgatgtccagcccatagcacaagcagatccctatcagatgtatgggacttaaactgctgcaaggagggtcctcaggagggtgggctctttgcagatgagctttgcaatttagagatgaacaatgaaggcagggtattaatgagttcaccagacacaagataaatgataaatgggtgttttatcgggggacaacttacacagataatagtaaagaaccatcacagagttcctgctccagaagaagcagtctctgcccttccaatgctctcggcacaacccaactgatagtgcccgaccctgcttctctaccttcaggcagtcatgggtgtacctgaaaccacacccaaaagggtgtggccgctactgcaattttcactggcaaggctacatgccactacaaaacgacattcccctttcagtaaagctaacagtttattgttggcgtctgcttctgtcatccatccattccttgcaacaactgaactggcctcactaccttctgacacactatgccatgtccagtctgcactgctttgctggggtctgtgtccaggcctgtgaggaggatgcagccatcccttaagtccccaggtctttggatcctggtgcctgacagtcaatctatagctagtctttttctgtggtcagaggaaccactttctggttgacaataaagcgaacctcacacctcatgtttgtcaataactgagcctcaaatctccttggcatgagctacttgaattcccaggagatggctagcagatttagaagtatatggcacacattttacaggagaggaagccccttaagagattttggcagagtgaggaaactgtccaagaaaggacccccaaagggatagagggaagagaggctgccaagcacggctgggaataaagcctgctcccagcagccagactggaaaaagactcataagtcccagagattgggataagtgttcaggagagatttcaaaagtgaaaaattaattgcatggcctgggcaccatttcagaatgcccaactacttttccgggtcctaaaagacctagaaacagctaactaacccaattacttaactacatagtagaatggagcccacggcagtttgaaagaatccaaacatttccatcatccaacaagataactttcagaaagtctgtctggactctaatcagaggcaatgtgcaggccaagaaagaaaacttaaccctcaatccagaaaagggctggctagttacaaccagcttagaactggccccagtgctagaattagcatcagcttgaaataaaactggtgaggaatctccaacccaggatttattgggaataatacacatgaggttgaactatagttctcacatacagaccagggctgtctcctgtgtctacagacagagggaaaggagttaggggcctatatcatgctcaaggacgatccgtagtccgtaaggctaagatttctttattcagataaacaccagccaaacgcaagccagagcgtgcccagaggcagcaagctagctaggccagagacaaggggtctccacgtgtctgaggccccttaagaattgcccctgcatcatcttcgacctcccctggccacgccttcatggcacacctgtaggggcttctaggaggcggggctacaatctttccctacaggggccaaagagtttatgggatgaactgttgctggctgggtcttatatagctagagttctgattggcaaatgttaattgtgggtaggcaggatttgaaattgaattctaatgagaaccctgtagtttcagaatgggggtgcaggagtcaagcaccctttgttcttttttggtcacccactgactctgtttcaattggatgtcacactttgtgttattagtttttgaagtgcaagggagacactgaaagtctgtcccagcaacattgtcaccctagctgaacactaaaaacagcatgttcatacagatgggaaaacagacttttaaaaagaaaaagagattctcaggctggagagaaccctcagtggtaagagcactggctgctctttcccaggatctggattccattcccaacacccacatggaaaccacctgtaattctagtcccttgggattcgacccccttttctggcctccacagacactgcatacatacggtgcatagaagttcatgcaggcaaagcagctatatgcataaataaaaataagtaaatcttaaaaaacacaaattctctaatgtgaagcagtgctaaggaatattaaactcttacagtggacgataagaggcagaatattaaaaagcacgttaccaccatcatagtggctcattacagtagttccaagacttgacaggaattgccatgactttgaggctaaactgggcttcaaagtgagatcctgtttcaaaataatagcaaagccaaacaacaccatccaattgcagttgaaatcctcaaacaggtaaaattcatagtgtttaagtctggttgtttctggagtatgggatcacagaggtaaagactacaagagggcattggggaaggtcagggattctctgtatcgacaagttgcaggcgtgtttgcagttataacagtggattgcactgtccagtttgtggaataggaattctcattagcattccaagaagccaataggaaaatcacacttcatgtagaagcagatccaatggcaatgttgagcagatgaaaacatgttcagtatcattaggattcttagtaacaagcagaatcacagccagaaaatattttatacctgccaaacttgtgatattttaaaactttaaggtatttttgacacctcttatcatgctgtgttgatgcaagataatatatagagtgatcatgttaggaaatattatggcttatctgtgccattaaatactccttccatgagtgtttccgtaaaaaatgacttgattattagagacgtggaatttatggaactatagacaaatggtagagtcaagtatgcatggggtacaactatcagaagtggaatttgatgaagctacataaaaacataggtaaatctcagggtgtaacgctgactgggaaaagctggtctccaaagactacctgcagaatgagttggtatctacctacctacctatctgccatctatcaatctaccatctatttggcaacatacaaaactgtatgaagtttacaggcttaaacatggtaacaataagaaaaagtggaaacaatgaacagaattaaatcatggaactagagaataatgcaaagatgtttgtttctttatttcttccctccttctcttctctgacctctttttcttcttcccctctgctttgatgatagggtctgagacaagcagcccagataggcttggtcttgcaatcttcctgcatcagtcttcctaatgttatattgctactctttacaccttatatattctctgcagaaattctttcttttccccttagtgtttcatatgagattaagtgaaagagtgaaaaaataatataggagagtcaaccaaagcttataaagtaaatatatatatatatatatatagcttgccagtgacaacttaaaaaccttcatgaaactcaatttaaacctgcctatttttaatagtgaaatgccctcatttagattgataagattatgctgtctaatggtagagctgaaagacacaaatgatgctattaatgaaataatgcatgaggtaaattcgaggagttatgaacatgttgctcattcccagatcataattaactgattacatgtggaggtgaggagcttgagtgtaaagacttctgccatttctctagagatgctcatttggccttctttacacagcagttcactacacgcagtggaactcatctcccttgctggacatttcaagtcatcagagggacggagggagtagctttgggtgggtggggtacccaacacagaatcctgcttccgagaacccaatatgtaagttgaaattttattccatgtcttctgaagactgatgtccccctggtacatttgtgtcctacatgccagtggtttctggaagaaacaacctgaatctgaaggatttattgcctataaaaggagggaaattccattctgaatttttggtcttttgcaagaccacagtggtcatggacagatctatttagacttaggagtctgcctctgactgagtggctgagtctcagctcataagcaatggagagaaaaaaacagacactattctgggttgtctaaaactgcttccaaaattacacaatgcaagtctgaggatgtggctcagctgatagacagcttgcctagtatgcttgaggccctggttccagtcattggtacatgaattgggcttggcagcacaaacgtataatcctagtagttagaggcaacagggagatatgagttcaagccacccttggctacataaaaagttcaaggtcagcctgggatacatgagaccttgttttcaggaatagaggaagaaaggaaaggaagaaaggaaggaaggaaagaaaaaagaacaagctcctcctccaaggagctatgagcagttaatggtttatgggaggagtagagtcacagtccttagtgtgtatccactgtgaagctgcccttccacctatgtttatttaagtgactttaatgaaatgcagagggtcacaaaaggcatgaaatggggggcctgtggggtaaagagaggggtacagtgtgagtgggaggggaacaagaggataatggtgttgggatatcaaagtgtattattatttttaaaaatatttatttatttttattttatttgtgtcctggcctgcaggacgtcaacctggggcaagagagtcagggatagggaatggggacaagagacacagaaagaacgaccacaagacaggattctgatcaagtggcaaactttacttttctcaggctagcttatatagttagcagagcaggatatggggaggggcagaatgggttgtttgtgtaccaggtgttagtataggcaggatattaggaagccacaaagaggatgtttggcagggtaaagagttcatgagtaagaggtccaggaagggttgcctaggtgactgggcctgtgggtggaggactggatcaagttgtttcttttcttgagctgaggttctaaggagctgcaatgtaaaggttaatatacaactatgtggccagccaagcatgacctaggatctcatgccaagtcctgagatttggctcccaacatatttgcattggtattttgtctgtatgtatgtctgtgtgagagtgtcagatcttggagttacagacagttgtgagctgccatgtgggtgctggggattgaaccagagacctttggaaaagcagtcagtgctcttaactgctgagccatctctccagccccccaaagtgtattattatatgtatgtctctctgtatatggatggattatgaaggaacagtaaagattatgagtgttctgattatagaaaccaaatattttcttgtggaaattacagcaagattaggaaattagaaaagagcatctcttaaatgtcagacttgtttattgtctctatccagctacccccaggatcaggaagcaggagatggggaggtaggttctgccttaggctggggaagaaacaattataatagaagaggttctgagagtccaggatggggagtggtggtggtggtggtggtggtgtgtgtgtgtgtgtgtgtgtgtgtatgggggggcagatgttgaaaatcttgtgtcagcctccttcactgctcattcaatgcagccttctnnnnnnnnnnnnnnnnnnnnnnnnnnnnnnnnnnnnnnnnnnnnnnnnnnnnnnnnnnnnnnnnnnnnnnnnnnnnnnnnnnnnnnnnnnnnnnnnnnnnnnnnctgtttgtgtgtgtgtgtgtgtgtgtgtgtgtgtgtgtgtgtgtgtgtgtgtgtgtgtgtgtaaacactctatgaaaaatgtctccagtaatcccaatttgaacttttttttttagttttccccatttttctcttttctttgattctaacctgtatgctttctctgtatttgtttactgataattattttagtgtacttgccactaaagaaatggggtggagagaagaggaaaagggaggaaatgagcccgcactagtggagttcacatctggacccagattagtgtttgcctaggtcagcatttatttatcttttcactaaacttttctatccaatcataagctaaaagtgctttccaggcaagtggacataagatgaccagcgacactgatggagttacagaaggtaaccagaagatgggacactggccatgtaggaggtcattcctttgacaaaatggaaaatctatattcctttttggtgtgtgtgtgtgtgtgtgtgtgtgtgtgtgtgtgtgtgcatgcctgtgtgtacatccaactgtgcatgtgccatagtgtggagctcagaagtcaacttcaggaattggttctgtcctaccacatgggtcctagggatcacactcaagcccttaagcttggcggcagatggatgcccttaccttgcaaagccatctggctggctcaagacagcattcccagaacaatggctgcagatcttatgagacactgtggtagtaacaagaggcatatttaattcatagtaagtccagttgttcattgagtaaacttaaaggcacaatattgaaccttgcggtcctgaaaattcacacaggaagtggctgtgaagcttttccactggtcagtaattacacagagcacagtgttgaccctttactcgagaaccaccccctacatatatattctgactggcttaaaaatttctgtaggtaaaaaattatagttaaaagctgtcacatttttcaggaagaatatggacaagctaaaggctttcttaatgatgtcttgcatagagctgtgtccatgaagatgggtttcctgtgagcaagccatacaaatctttaatatgttttgtatttgcactaaacatcatggtaatttataaataagttaggaaatggatatcagttaaaaaaaatcaccctaagcagaaatttctacaaagaaacttaccctaggagatagctcacatctataaaccaacatttgtctgaggcaagatcagagaccagcttgggtgatgagggatgtccttctgtatatatgtttctcttattggttgatgaataaaaacattgtttggccagtagaggcaggaagataggtgggactaggagatgaggagaattctgggaaaggtaggcaggagagctgccagggagacgccatgtagagaccaggaaaataggatgcaccaggcattctccggtaagccaagaccacatggaaatacatagatttatagaaatgggttaataattaagatagagctagctaataagaagtcttagtttaataactaatacagtgtctgtgtgcttatttgggcctgaagtggcaacgggacctggtgggacaaaagaaaactccagcaacacctgggctccatgctgagttggaggccatctgtgcctatagaatgaaactgtgtctaaacaaacaaacagctattttctttgatactgcactgactggttaaatggccatttcttgaagatttgaggaattctgaactctgaaaaccttactaaaatgaacctctgacatcttataatattgaaatattagctcttttattaattcacaattttgttatgtcccctttcatttgtaaattattgattcacttagttatgcaaattccctgaatgataaatcatttcattacataataggagaaattatgttcattagcactcaatctatgttgccaaaaaagtttttaggattgggaaattcttagtacaggagcagattccatgattctaattttcggttgaaaggacaaattttgcctttggcaatgaatactatcagttgttttcttctaagtgaaaactcccttcagtcatcttcttagaaaacattaccagatctaaaacagcctggtccacatagtaaattccaggtgagctagtgaggctgttactcaaaacaaaacaaaacaaaaaacaaaaacaaacagacaaacaaaaaacaaacctaaccccaactaatagtgtctgactaaaatcaacatgcaacgcatagctagactgccagctaagctttcaagcaacagagtttcctggaaaaaaaggtgcaggatctgagctatcccagaatcccaggagtactttcctcagagatgccacctggcttgtgaaacagcaacacaagtgctgtatgcacacatttaattctacccgctgaaggttaaaagaaactactctagaggtagagatttaataaaaccaaccccctgcaggctctttttttcccttccatttattatgtatatagtgttctgcctgcatagatgcacacactccagcagagggcaccagatctcattacaggtggccgtgagccaccaggtggttgctgggaattgaactcaggacatctgtaagagcagccattgtcacccctgcaagttcttgacagtaaagacacatagtggttgttgttgacttggtttgggccaagagcagttttctccactattgctttttctcagtcatttcaggctcagcacagtgacaaaggcagatagcaccgtagacttttcattccgagaacccatttgtgatggtgattttgactgtcagcttgattggtctcagacatgcctgggacacagtgagggtcacctctgctttcagagagggctcatgaaatggtgatgtgtggatggcacccatcatgaatgtgggctgcgatcctggatttaataagggaaaatggacaaagccacctgaacacaattcttgttttaatgttttcctggtctgttgagatgtgagcaagcagccttctgctgcaggcaggggctagttctgcctccttgccatcactgatgtggtggactgtaaaccctgaactgtgaatcatccctcaagttgcttcttgttacataggtggtcgcagccataagaaaagacactcatgtagcattgaaaagctcttgtggacccccagtccccaggctctgaaggaccacactctagaaccgacgactgttttagaagggacagggatgcccactaattgagatttgtgtgggggactgagggttgctaagcagcagttcccaattaaggcccatcgaagtgatccaaggacatcagtggccaactactgtccataaattaacaggaatttgtgtcttagcatgtgatttatctggaagaggcttttagtgctgagttctggaagaagccaagaagaattttattacggtgatctattttaatattgagctcagttcagccatcaaagccattttcaataagctttcaggaaacacacggatgtctcttctctttagtcatgggctctggggctgcttcagaaaggaaataaatcctctgctaatgtttaggaactaacgatgatgacttcagcctccctaaaacttctctcaagctttgtagccttgacaaggaacagctctctgggaaagctctgcatgtttgcaggcttattttaaagcaaactaagattcagactggggcaaatcaattaacatgcagaatcttagcatcaggggaactttgtaggatgcaatcctgttttctattggttcttacaaacaaaggtaaagaagccaggaaggccacactaatacaaaccatgtatactagtttgcaatactccctgacatttctgtatcttctatgacaaaataagagaatttggatccctctagccagtaagatattcccatcattcacctctttctgcactgtctcagcatacactaggcttgtcgacaccccaggacaccaaagtctggcagaagccatcttcattccattctgctgaacaggtgtgtttttgtaaacgttgcaaaaacattgggtgtgtttggaactgaagatctggaaagggcctgaggaaataggaagtatattcagatggtggaactgtgtgtggaacaacacaaacttgttttgtggcaatgataacggttggtttgatgctaaacattgcttggaagttgctgcttcttcaggtctccacatcctcactttgctgccaccaaaggaccaagtttcagtagctgtagccaccatgaggtctacatgaaaggctggagtcatcgtagaacacaggaaaaggaagaattctacatattcttaaacaaagagcattcatacgagaaaggaataaaagagttgaggataaaagaagaggaactttgcaaaaataaaaaaaaagatagtgtggtctaaggaaagctgtaaaaagatgaggtccagttcagtggttaagctcttacttagcctgattgaagcttaatcttttacacagctacaaacaaaataatcagtaaataattggctggccctcccctctttagtccttcttccctttgacatctattcatttattaggtttaattttcatcaaggtattgaaaatggtggggtgtggagatattggaacatggctgtagattcttggatgcaccttcatggagaagcccggggtctgtctacttcctttaaactcccatgagcttgtggctgcctaagtcagtgtagtacggctgtagtgatggagtgataactaagacagcagtggccactgcactgtctcagaacatttgcttctgagaactgaggcactgtggaagaagcctgcacagcctacagcaccatgttagagataccataagtagccattctgcttcacagtccagatgtggcttcacaccggcatcctagccccagcgaaggatatgggagtgaccccccacccataaccagtcagtgtagccctccacaacacagccatagtagatggggttcagtcagacagtggagctgagaggatgcttccttggggtacctcttcggagttcctcacctccaccccaccccagaaactatgagcacagcatggtggttgttggctaaccccactgagatggttgattacttgtgatggaaaaccccactgatttatgagatggttgattacttgtgacggaaggtaggggtgagtagctggttctcagttagacaaacacaagcctacaacatcagatacttcctgtatctgatggttctgtcacctggtttgtacagtcggttcatcaaaggtcatggacacgtgagactgagatggtccaggaccagccatgggggaaagcaggcgaaaattcaccgatttcctctcaacactacctcgtgactgacgtcagtaactttgtcagcctcaggtaccacatttgccttgaaaactcagagctcatcttggatgttaaagcatgacaaggcagatcttgtggagatttttttcaaggtaaggtctgtgaaaacgcaacattaaaatgatccctaaaaagactacctaagcattctacggtaaaggtcacagtatttataggcctgcttcagtctcctgaattttaaataccctgtggttttaatttaatacccagcatgaagctgttctctgctctctaacctctcttaatgtcttgatttacttgactatgtaaaggtaattataagagactttttagagtcaccaagtgagaacccacttctcatccacatgggaagagaaatttaaccaaattgatggcgatttctatctaacttctgagagctgagctttgttctgtgggctgttctagccgccagcacctagcatggtgattggcatgtcataactatgcaagaagtgtttgttgatgaaacagaactgacactactgagtgggctactgaagaaaagagaagtatccacaaactcttagagttcattctttgagtaaagaattattttctataaattggcatggtgtcccatactggtaataccagcactaagaaagctgaggcaggaggattgcctagtagtttgaagtaatcttgggctatgtagtgaattccagggtggcttgaactacagagtgagatcctgtcctaagaaaacaaaataaaacaaaatgaaaaacatttactttttgcatattttggccactgcccagtgaaagtaaagtcagtcagaagaaagtatatgtaatatacatgtcaataggctggtggtattaccctgacacacttctgtaaccccgttatcatcaaggagggcagaggcaggaggatagaaagttttgggcaaatcagcctggattatgtagcaagactgtctaagatttcttgttgaattaactgagctttcaaatgtaggagggaaagctgtggccatgagcttagcattttggcgnnnnnnnnnnnnnnnnnnnnnnaaaatggccaccaaaggggtggcactattaggaggtgtgaccctgttggaggaagtgtgtcactgtgcaggcggactttgaggtctcatatatgcttatgataccacccagagttttaaaccacatcctgttgcctacaaagccaagatgtaggactctcagctccttctccagcaccatgtctgcctgcatgctgccatgtcccaccatgatgataatggactgaacctctgaactgtaattgagccacctcagtttaatgttttcctttataagagttgctgtggtcatggtgtctcttcatagcaatagaaactctaagacaacagaaacaacggcacagcacaatacagtgaaaaaacaaaattgattgaagttttattcatattctatatctgtgtatctaatatttccatcacttagaaaggcttttatcatttaacacaaaaaccaagttgcctataatctctaactaaaggaatggaactcagttgaaacccctttccttgtctggggatgtgtgcaaacatttgatttgtctcattcccaatacaagtgtttacaaggggctccccatcacaggtagatcccgtagttcaacaatagcacaatcctttcacaaaccttttcccagcctgcaggatgccatctattgtttacagagcacctgggaacacagcagcatgtccctggccctggtgaaacagacacaatgatgctgctggcttctgtggtactcaagtcctgccactgctcttttggtcctcatgccaaccatgtagggatggtgttatacttgccatcactattatccatatcctggagaagaggacactaagtggttaacttttgccaagtaacttgcccatgttttagtcactgttgtgtcactgtgaccaaacgcctgaaagaacaatttaaaggagggaagataaatctggctcatcatttcagaggtgtcaggctgttatggtggggatggagtgttggagaagagcagcttgcaccatgcagccaggaagcagaaagaggaaatagggaaggccagcacccaggaacacatccagagggacctacttcctccaacatggttccaacacctatcttttatcacttcccaataatgctatgatattatcattcaggggatcaatatattgactaggttagagctttcacaatccactaatctgcatgatttttagttcaatcatgttagcaattaaaaaaccatcatatcactcaatttcaaacatgtgataatagccaagattcaaaccctacccccctgacttcagattcagggttctcatcttggactgtattacttcttagacactttggtattcatgaccggtttatgctctccaaaagcatcaaaacaggctatagtaataattttatattagttcctttatccactaaaaataatagcttggggctagggagtctgcagtttaagagtacttgttgctcttgcagaagacctgtttacagttcccagcaccacatggtagctcacaaccatttgtaactccagttccaggggacctgacatcctcttctggccttggtgggcatcaggcatgcatgtggtacacatacatacatgcaggcgaaacactcatacagattaacatttttaaaagaaaagacagcttgcgtttcttttttttttagattttttttggaatttcacatcatgaaccccagtcccattcatctctcagtccctctatatgagcctttcacccttgtagcgtctctcctcaaaagacaataaaaaataagaatattaataaaaataaaaataaaaaacaaaccaaccaaacaaacaaaaaaccactttgttccttcgtctttcctacctttgcatcttgtcttcattcattcattttagtggcactgggagctgcggtgtgtcacacagtataccttttgttcaaacagctttacttgcaattcttctttgtaatgagttgttggtctggttcatgcctctggcttctggtatacaccatcaactggaacctcaccatgactcctctcggatatcctgctgttgccctgagtcatagagatcccgtggctatggtttcacaggaccagtcccttcatgtgctccagcaggtcatagatggggtaaatgctggggagggccaactcaaaccctggatgtgggtctggatggtagcttgggctggtcattcctggcctctgacatcttgcatttcaaatagagaaagcttccttccttgtaaatgtaacttgaaatatctctgacccatttttagcaaagctttggcatgctgttttcattattcaaactagcccaggggttatggatcatctttcaaacctgccgtgaatccacatgtattagagaagtaaccccatggaagtacatgaagaactttggggaaatgtttctttttgtggacacagaagtgatttccaagtaacttcctgtgtctgagcattaataaggagaccagtcacatgtacatagtgtgcaaagggcctgtccactctgtggagccccaactggaggcaatgatggggctgatggggaacagttgtggatttgggagtgagatagtgtgtcccagtcctgactttgccacttataaatcagctcttatgtggaaggtactaatgagcccccagactctcaggtgctttcagatacaatggccactgtagaatatctacctccaagtagatctgccagtattagtgcataaaaatataggttacctccctaaatttgaattccagataaacacagtatttaaagaaaataggagtgccttcaatgttgcatgtggcacaaactaaagttattgcatgagatacaagaaaatcttccattatctgaaattgaagtttattgggcatcctgtgttgtaggaagcacctctacccgaaagggctggtgtgatggctgaaagaaagaagtaacaggtaccaagtctagcccacttcctgcgcatgagagagagacaacatgtcgttctttctcctatagaagaaccttgtggtaccaagggtcctctcctggtctggacttgtcatctctcctcttaagagtttcctctcctatgactgagaaaatgttccttatgcaccgaatttaacataaagtattaaaattgggtatttctgacagctagcatttaatttctccctagtcttttgcaaatttatcaagtgaggtgatattttgtttatgatgaacaaataaagcttgcccgaaggtcagagtacaaaattagccacactagttaaccatagaggccagacagtggtgatagaaactttaatcccagcactcgggagacacaggcagatggatctctgtgagttcaaggccaccctgggctccacgagattgaatcttctaaaagagaaacagagctcacacaaaggtgatcccagcacttgggatcccatgcgtttaatcccagcactaggaaggaatataaggcaggagctcagcgcagtctgaagagcagttgagtcaggagcagtgtggggtttggtggattgccccttcggtctgagcattagtagaggtgagggctctctagtagccggctgctttgcttttctgatattcagcttgaaccccaatatctgtttcttgttttttattattcgtgctacaatagagtattttacatgtagctccaatgtgtatttattcttgcaacacttcccgctgcctgccacagtgctgggaagtggagcacagaagtgagtggtccctggggctggagagacggctcagctgttgaggacacacactgctcttgcagaggacctgagttcatttcccagcacccatatctcacaacctcaggagatccagcacctcgtctgggcactcatacatctgcctggcatacattctctctgtctctatctctgtctctctctctctctcacacacacaaagaaaaattttaaaaattataaagacatgggcagtgcctgaaggaatcttgcccttggtgttagtattcaggcgtctgtactggcgtccttggggtactgacaggatacgcccttagctgccgccacttagagcaccgcctgtgcacattcactacgttcccctttaaaagggccctgcccacttcccatccttctctctctctttctcttcctctctgactgttctcctctccctttgtctctccccctctttcctttctcctctcttctgctactcctgtctccagaggccagtctctctcccttttatgatccctttccctaataataataataaaaaaatccctctgcttgagccttgtttcatggcgtctttctcatgcatgccgcttttctacaacatttgcagtcaccacctccggcaggcagcattctgctgacgtcgctgtattcacgtgtgttacttgtgtgaccaagacccaatacaaaccagtgtaaggggagaagagtgtacaggctgccatggtgggaaggcatagcagcaggaatgtgaggctacttggtctcatgttagctgactacgaagctgggaaagaacagcaagtggaactggcctataaaaaacttccttcagtaaggttctgcctcttaatgaccacacagccttcgggaacagcgccacctgctggacaccaagtattcacacataagcctgtggggaatagttcatattaaacaagcatctggctactgatgcctctccccgtaccccacccttctggggaactacataaatcctcttctatttcttgcaaatcttgtgccttcttgagaattcatctgcacttaagtcatttcagcaaattcctctctagtctttttctctctatacagtcaagcctcacacccaggaatgttgcaattttttctctcccccattctatccattggtagataattttcactctataaagaaacggcacccttaagcttccattgtcccttccttcccacaacacaggacctttcccttctcattagtagcatagccacctgctgccagcttccttgattcaaacaaccgttgattattgtaataaaatgatacttatttagtgtgcctgttggtgtgtgactgtggaggtcagaggacaactggctggggtcgcttctctccttccaccatgtgggtcccagggattgaactcaagttgtcaggcttggcagcgagcacccccatggaaccatttattgatctttgattggacttttaaaaaaagcacatttactcatcactccaatatgtaaaaccccaaaatttaacaaacccaagacttctcattccactcagaaaaaaaccttcactggctttcaagactcttccttctcccatccctcgaccggctcactgccctcaaatttagagccctttggcagagacgtgcaggaccgactgcccactcacagggtgggggtgttggctgaggctttacctgctgaagtccacccagctggaccatcctcttttctgccacctcccattccacactccatcattgtctttctcattgggaaagggagccacgtcttgtctccatggttcaccaggatgtgtctggtcctagaacagtgctgggggagtcatggacattcattgtctatttgctgagctggagtgagtgtggatggttgcacaggcagacagagaatgtgagcaagacccagaaaagagagcatttgctgggactgaacagaaggtgagaattgaaatatccatggtatgaacagtttctgtggttattggaatattaacttgcctatgactgtacacctgagatttacaggatgctgctgaactcgggagtcaaagaaagcaaaaaacattacaaaaggctttgaaaaaccatctccttcctgttctgtcccctgggctccttctcatatctatgccataataaattcatataccaaacacaaagaacagggagggagcgcctctttcctccccacaaaactaagcacctgttctctatgcccagctggggctcttccatcagggaagcaggagcacatttgttgtcttattgaggcttcaagagtgtagctcagcactctgcagccagatgagggcttccagcagtgtttctggcttctagctacttattttttttttttaaatttgatcttagatgttgcagaaatggagcgacagaaaaaataggaagagaagtgctcatagtcacaaagaactggctcagggcttctcttttccaggtgtggaggacacacacacacacacacacacacacacacacacacacacnnnnnnnnnnnnnnnnnnnnnnnnnnnnnnnnnnnnnnnnnnnnnnnnnnnnnnnnnnnnnnnnnnnnnnnnnnnnnnnnnnnnnnnnnnnnnnnnnnnnnnnnnnnnnnnnnnnnnnnnnnnnnnnnnnnnnnnnnnnnnnnnnnnnnnnnnnnnnnnnnnnnnnnnnnnnnnnnnnnnnnnnnnnnnnnnnnnnnnnnnnnnnnnnnnnnnnnnnnnnnnnnnnnnnnnnnnnnnnnnctcacacacactcacacacacacacactcacacacacacactcacactcacacacacactcactcacactcacactcacacacacgtgtgcacactcacatactcacacacacacactcacacacacacacacacacacacacaccccacatgcatgtatgcacatgattcatccccacacctcattagggccacattgagtatgggacatggggaaaccataaccatggttcctattataaaaaagggagggggtatcttgcctttttttttttttctttctagtggaggagcatgtgactgcatgcatgtttgcatgtgtgtggacacaagtgttgcaagtacacatggaggcctggattgacagcagaaatcttcctggattgtggctgccctgcaccatctgagtatcaggcaaaagcctggagatttggatgaacgacaaaacatccagtccttttttgagagaatgtctctcacctttattgtggagcagccttatatacaaacttacaaaaccccaggtcaaagggttcacaacaggatattgatcccagtggggtgaggtcaggaaaacaggaggtacctgtggttatgctggaaaacaactcttagagaccccgtggggactgagtcccaacactggatcacttattctttgaggcagagttggtcagtcaaactcagagctcactgatttggctagtcttgctagctagctagctttgggacccctggggtatgatttatttaacaatttatacatttttacttattggggacatggtaattgtgatgatttgagtaagaatcatccccattggctcatatatttgaatacttggtccctagttggtagaactgtttggaagggattaggaggtgtggctttgttggaggtagtgtgttgctgtagttttctttccatccaggtcctgctgcccttcagccccaaataaacacacagatgctatatcaattatgaaattgttggccaatggccagggcttcttattggctagctctctctaaattattaacccatatctgttaatgtaagtattgtcaccaggcagaggcttatctgcaatcctgcatgttactcctttggcagcatggtatctctactgagcctctcagattttttttaaagatttttttattatgtatacaacattctgcttccatgtatatctgcacaccagaaaagggcaccagatctcataatggatggttgtgagccaccgtgtggttgctgggaattgaactcaggacctctggaagaacagtcagtgctcttaacctctgagccatctctccagcccgagcctctcagattttatttattaaccaataagagaaacatatgtacagaacaacatcccccatcagaggtgtgtcactggggatgggctttaaggtctccaaagactcccatcatttccagtgtgctgtctgcctcctgctcacagagaggcactctcagttgttcctgattccatcataaactctcaccctctgaacccatacacccaattaaacaccttcttttataagttgccttggtcatagtggtctcttttttttcttcctagggtctcactgtatagctctggatggcctggaacttgctatgtagaccaggctggcatctgcctgtttctgcctctcaagtgctggaatgaaagacatggaccactgcatccagataatcatacttttatcacagcaacagaaagtaactaatagagtaataatgttgatccctagtttgaaaataagtcaaaccatactgcttcttatttgtgtctttatttacatgggatagggatggaaaaggacaaattcagagtgatggtgacttataagagaagggctggaacagtgagtgggaaaagagatttcaaatatacataatttttaaataaggtgagtgtgtcaagattattgaggactagtggcacatatttatagacttagcacttgggaggctgaggcagaagggcccagagttctaggtcagcttgggctacacattaagacaccatctaaaaaagatttgatgagtgtttggtggaaacagtggaaatggatataatcatttctttattctgttagggtctatcaaagctatattttcaaaagtagaagagaaggatggagttggataaaacagatttcatgccattcttgcagcctgagttaaatctagagagatttaattgctcccatgtggaaaagcatttggcatttttctttgatgttgttatattttgctatagcttgaattatgaaactaaagatgtttgagatgttccagggttcagatttgccatagggaaatggtctctttcactgtagtagtactttctcgttgggactgccagcctgcaaataatgatagaatgatttattatcaattataaaagcttggacttagcttaggcttgttcctcaccagtttttataacttaaattaatccatatttttaaatctatgttcttatgtgaggctcattacctcatctccatattgcccttcctagagttctctcacagactggaagtcctgcctagctattggccattcagctttttattacacggatcacagcaaagcatcttcacacagcgtataaataccccacagcatctctacatttctctctctctctctctttctctctctctctctctctccctttccctctctccgtgcgtgcgtgcgtgtgtgtgtgtgtgtgtgtgtgtgtgtgtgtgtgtgtgtgtgtgtggtgtgtgtgtgtgtgtgtgtgtgtgtttgtgtgtatgtatgcatgggtacattgcttccatcacatccccaaacatcatctgtgtaagaaaccaccccctaatatgttagaacaaaatgccaagcatttccctgggttctcagcgttgaatgaggaattccagcagggcacatggtgtacctgagtcttcactgggctgagagggacctcagctgggatgatgctcactgctgctcatgtttgtcttatttggtggatgatttatatctttaattttcttccttgctgcgctggtagcctgagtaaccaagggggttgtcctgctcaggtggctgtgatcattaagacaacctggatatctttccttattagcccagcttctccaactggctgacttgagcttccttcctgtctcaggatcattggatttcttccctggcatttatttcccctcaaagaaagtgttccagaaggcggagagtgcaaatcgctggtcccatcagacttgggcctggaactaccagtgaaacttttcatcatgttctgttagttggctggatcagagagaggggcagcccagataactactcttacaggtctgcctacaaggggagtctctacaggtttgtagccatcttgcttgcattttccaaggacatgtgattcctcaaacaccaacaccctttgatgtggtaggagcattgcatggtaagctaagcagcccaatctttgcagtctctcttcatggccttgtgttccttggatgggagccaggtgtgcctnnnnnnnnnnnnnnnnnnnnnnnnnnnnnnnnnnnnnnnnnnnnnnnnnnnnntgagagccacacagaaccaggtccagattctgaccccattcctcattacaggtgtcaccttaggttggtctttcctttttattaattaaaaattatttgatattttatacagttatttgcagttattctgaacatatctacccttctcaacttctctggtccttccctcacctttcccatttccttccctacttcatatcctcttttttttttttttttttttttgaatgttgtgaccgagtttatccattatgtgcacgagtgtagggccaatccactggagcatgggcaacctaccagtggctgtgttctcgaagaaaatgaaatggacttttcatctcttagcagccaacagctgcccaaaactccccagataggggtggggtctggtaagccctactccatccatgcaggtgtgttaagtgcttgcttgtgtgaaggcaaccacagctgttataagtttatggcctggataatttaattttaaagattaaacaaatattttaaatggtgtgtgtgtgtgtgtgtgtgtgtgtgtgtgtgtgtgtgtgtgtgcgtgtgacatgagctcaggtgtcctcagaagccagtagaggatgtcaaaccccttgtaattggagtgatatgaactgtctggtgtgggagctgggaaatgaactggggtcctctggaagaacaatgcttgttttgaacagctgggctatctctccagtctcctggctggttattcttgatgccccagtttcctctttgtgagatggaaatagacgcagcccctgtttggctggtgtgttgtaaggctagactggcatgtggccagcattcagtaatcacggtctgcccttcgccagtctccttgtcatctgtgtctggcattagatgacatcttgtgtgaacgcttccataagcagtgccatggttgtaaccagttactactgtgatgtgtctacctgctctgtctgactaggatgtgtttacaggtaggaatcgtgcctgtcctgttcttgggtttgcttgtccctaacgtcctgcagagtgctaggtacagactacacactgaaagagaataaatgagttaatgaatgaatgcatgaatatccccatatgtgaagctgtagggcatgagagcaaacagttttgaaaggcataggattgggtgctgggaattatggtttttcttagctataggacagcagctttgttcctttacagaaattctgctagcttattaggaaggtcagggaagggtattcagagaacaaaagagccaattatcctctttgagaaaagcatggctcagcagtgacaggatgaagaggagagaatctgctggaggagtcctgagaccagagggagatgagctgcaggacagctctgactgcactgtgtgcaggatgtgccaacacttaggctctttggtggtcagtgaggtgaagcaggaatgaggtggcataagaagcaagctagaagaaagaggggtctccaggcttttccccaaagctgaggcagctttgtgataactcaaatgggccaggactttggtgcctcctaattttgggacactaatccagtcttggcagtgacacccacacttgacatgaacacgtggaagtgccaaaggctccttgcacacatccatggggagctgtcagagccccaggctatgaagaatatccaaggatcacctgccaggcaggaagatgttcagaatgtcttgtccgggcttgttgtcactcagtagtannnnnnnnnnagtacacttgtcatcttcatatcaagaaccataaagacatagaacattttaaaaaaaagctctcagtttttttttaaaaggtgaattttttcatctgtcaaggcagagagtaaatttatcacagaaagaacgagttttaaaaaaagacggtaccgtataattgctgccattaagaacttcagtccgcttgtcaaatatctgatatttatgagtttgataggggaagaaaatctccatgtgtgtttaaacttctccacgtctcagttattattctccatgaagtacctccaggtacaactgaatatgcagagggttaatttttttcatgaaaatgggttgcaaaacttaaaacttctttaatttgaagctcctaagtgactaaaaattctagtcagcgtaatcattcattctaataggcttgatgactgctgtctttgacactggcgtgtgtgcctctcagtgccttctggtcacatggccctcctgccttggagtccacactaagggggaagcagagactgaacaggcaaagagcaatggcttctctgctgagaaggttctgcatgggcagtgaggaaaacattctgggatcctctcatcattacaaaaaccttatcagtgtgattatgacaaacacaagtataatttaccattacgtttcctgcaaaatacatctcttcttcccgattagaaatgtgaactgaggtcttattgattgagatagggtggcatgcttgtgccataggatgtatgcagactccaggggacaacttttgggaggccgtttggcccttccaccttgttttgaggcagtgtctctcctgtttttaccattctgcatagttcaggctgatctataggattccaggtgactctccttctcgtcctttcatctcatgtaggcatgctgggaatacaggtacattcccacacatctacctttttttttgttgttgttcatctaatcttattttatttttattatgtaaatgcttatttgtactcttttttctatttttaatttaaattagaaacaagattgttttacatgtcaatcccagttccctctctctcccctcctcccctgccccccactaacaccctgcctatcccataacctttctgttccccagggagggtgaggccttcttccatgggggatcttcagagtctgtcatatcctttgggatagggtctaggctctcccccatgtgtctaggctcagggagtatccctctatgtaggatgggatcccaaagtccattcctatgctagggataagtaccgacccactaccagaggccccatagatttcggaggcctcttcattgacattcataccacattcaggggtaaacagtcctatgctgatttcccagtcctatgcatggtctggggaccatgagctccccaatgttcaggccagctgtttctgtgggtttcaccagcctggaaacatacattcttcaaaatttgaaaatctaaaggaaatgcacaattttcagtagagattacaattaccaaaattaaatcaagaacagataagcaacttaaaaaaacatataaccccctaatgaaattgatgcagtcatcagaagtctcccaaccaaaaaaagcccaggaccagatggcttcatttcagaggacatttaaggtagcctttccactgggactaggatctgacgatgaggctttatatagggacaggccttacctgatgaaccatcttggtggctcccctgctagatacttaaaataagtctgtgtctttattttatctttttctctttttgcagtatttggatggagttaggagcctctcaccctctcatttcaaaatgtagttagttttactttgactctttcccactttctcagctctgtgcagctgcaaatgacttctgtcacatcccgcctgagaaagttattgcaggcagactcctttgctactgttaccttgctgcactgagttcctgtcaaccagcagctgagcccgatggaaaattttctggtcatgttacaaacagaaccttcttttctggtgggatccagcctgaactctgtcatgggtgatcactctcccagaggctacctgcagcctgaagctcccatgctgtctctcagggcattgaagtgagatggctacccatgtcctcttacatgtttggtttttttttgttgttgttgcttgtgttttgtaatgtctgtctctctgctgggtttttttttttttttttttttttttttttttttttttggtaacaactgtctccaagctgcagtaagcatgaatttccaactggagaactggagttaacaatgtatgtatcctcttcatcttttagatcaaattggcagcataattttaaaaagaagtgttttacattcatcatatataccgatattttaaggtaagatgtcactgtctctgctttaattgtactgcactctcttcatcctcatttatatgcacatcaagaggcttgctctttcttttaaaagaattacttcgtttccatgtatgtgtgtgggtctgtgcacatgactgtgattgtccaaggaggccagaaagcagcattggataccctagagctttgtgtgtgtgtgtgtgtaccccccacataatacaaatattctttctttttttcttccttccttccttccttccttccttccttccttccttccttccttcctttctttcctagaaagccccggcgactctcctgtttttatccttccacccccgttgctggggtaatgcacacacatagctgcacctggctttcatgtgggggctggggatctgaacttaggcatcgtgcacagcaatgctgaatgtttacaatgattcttaacctgagaaggattctcttctcttcctctctcttctctctctctctcttctctccctctttcttctctccctctcttctctctctctctctctctctctctctctctctctctctctctctctctctctttccatcccaactcagcatcttgcaattgctaggcaagaactctaccactgagctaaatctccaacccccagaagctacttcttaatatctaggatattttaccttcttttcccctgaaacaagtatttctgttcagtttccctcacagcatttcagctcactgtgaataagacttaaaaactcttattaatggctctgtttccaaacattataaatatgtatataaacttgagaattctaatttctcatagctataaggctttaaatgtcaaaaaattcaattaagactatcatgtcctgcattattaacagagttcatgaaaccactcatacacatacatgcatacacacactaaacaggttttgataattagatattaaatgtcgacaggcaccttggaggttgctgcttatgtctgaatagctcttacccattgcaagtgacattctgtttcctctttatagatttttcacacttaaaagggaagaattatgacacagtgaagactccttttggtatgccagaactcctagtgatttatcatcagaaattatcttcagttctgtgtccctgactgctcaattactttggtgagaacaaacagctggaactcacctgatacaaaatgatttatcaccccgagttatggattatatacagattttttaaagatttttatttttgttttaaagtgtgtgtgtgtgtgtgtgtgtgtgtatgtgtgtcaagtgcacctgagtgcaattggtggaagtggccagaagagggtgtcatatccccgggatctgaaatgacaggcagttatttggaagccacctggcacagtgctaggactgacctcaggccctttgcaaggggactcttaattgcatctctctctaaccatgggttagacctcacatgtctcctaaatgtgatgtgttgaggtttggtccccactgtgggggactgtccctcagtaggagcagctggactccaaaacttactttctttttctcattagggaagcagccttattccaccctccaataatgaggccaactgacagggtgacacctctgaaactgggagccaaagtaaatctttcctacttttagttgactttttttttttttttttttgctcattcatcacaatgatagaaactaagacattgtaccagtgttatttcctctccaaggttttggaaaacatatagacaggctttgtctcatctaaggacttttcgctgatgggctgcactcttttaaaggtattttgcttaatccaagaatttagaatcagctattaatgggaatatcatggtttatttgtcaagtactactttagatactttagaacgaaatggttgtggtatatatttgcacataatacaaatatttgttttaagtattaagatgtccaggtttaacttactcattttatgaatgatatctgccatttgacgtatttgacccaaatcagtcttctttatgaaataacagattagacttacttaatgtgatttcatatttttaattcaaataaggctatgaaacgtattcctctgagaactgtctcattcatagattcagggcagtcagacactagggaaaataccatatgccctatttccttttccacatcgtgtgctttgcatgtgtaagcctgtgtgcatgatttgcatgtgtaagcctgtgtgtgtgtgtgtgatttgcacatgtaagcctgtgtgtgtgtgtgtgtgatttgcaaatgtaagcctctgtgtgtgtgtgtgtgtgtgatttgcacatgtaagcctatgtgtgtgtgtatgtgatttgcaaatgtaagcctctgtgtgtgtgtgtgtgtgtgatttgcacatgtaagcctatgtgtgtgtgtatgtgatttgcaaatgtaagcctctgtgtgtgtgtgtgtgtgtgatttgcacatgtaagcctgtgtgtgtgtgtgtgtgtgtgtgtgtgtatgtgatttgcacatgtaagcctgtgtgtgcgtgtgcgtgtgcgtgtgcgtgtgcgtgtgtgtgtgtgtgtgtgtgtgtgtgtgtgtgtgatttgcacatgtaagcctgtgtgtgtgtgtgtgtgtgatttgcacatgtaagcctctgtgtgtatgtgtgtgatttgcacatctgagcctgtgtgtgtgtgtgtgtgtgtgtgtgtgtgtgtgtgtgtgtgtgtgtgtgatacagagaggcagacatgtggaggttcaattttgatggcgagaatcatccttgatgactgcatgttattcatcaagtcagggtctctaaatcaaacatagacctcatccatatggcgtctcttgctagggagtttgctgtgctgccttctgaggctggaatcacagctggaccaccatgccaacatggcatttatgtgggttccagggatttgaactccaatcctcacctttgtggggtaagcactttaaccactgagcaatcctcccagccctttctttctttctttctttctttctttctttctttctttctttctttctttctttctttctttctttcttcatttgttgcctgttcttcgagacttgttttcatgtagccaagactcatctcaagcttgctatgcagttgagggtgaacttgaaattccccgatcttcctgtttccacctcccaagtgcttggattgcaggcatcaaaccatcataaacgtccttctacacagcctcagtaaaattctgcatgggaattatgacttgtgtttgtaaagaatcctagagagaaagaactgtgttcatgggtgtgtttgacgacagactattttagaaagggcaggtgtgaattaaaaataaagggcctgagttcttaaaaaccattgtgccatgtgctccttggggaatctttgttcgacctgagggatgtgggtccccactacagctggcttgggttgcctacagttactgatgggacacttctgtccagtgcatcaccagaagggggctttagagccagagagcatctgcattataagagaacaccaatattttttttctacaattgactgggcttcataggcaataatgtggagtatatttgtgggtcaccttgttactcatcctgatgtgaagaataccaggctaactttcatagctctctatctacgcagctctacattgtaaagactatgaataaaaagcgggatgagagatggtaagaaacgatttgcagcaggaataatgtgtagacacacagatgctcatacgtgcttgccgctttgagcaccttggggcatcagctttcttcagtgaaagactacagctcttcacagttccgataataacgatgtttaataacttcaaaaacatgttcatcctgaatgctcaatggcagcaactgttatcactcacccagggagattgtcaagcaaacacacagtttattatttataaaagataaacaaaatattttagcagctttttaattcttgttcaccagctgttgttggattcaaggagagagagagagagagagagagagagagagagagagagagagagagagagagagagaattgatttaatttgtgcttatttctgagttcctcagtgtgaacaggatgggaaaaaaccccagtacagaacaacattttcaagctcatcatggtggtacactcctctaatcccagcactcatgaggtagaggcaggaggatcaggagttcaatgccagcttcactatgttgtgactttgaggccagcgaatgccacatgagactctgtatcattaccaccaccactaccccacataaagaagaaagacgctataaaagcaagttcatgatatctgaggacagctttgccacaggtgtacacgagctcaaaagacagtaggacacagaggatcatattgatggcataaaattagagatgattcttgcttgtcaaaaacatttagttttcatgcaaacaaactgtcaaaataactgagtctgcactagatatatatagagattgtaaatataattagaataccacaagggaagctgtgcaaaaatccattggttatagatcagttactcaatgaattagtaaaaagtgatttccaacatccagttagtctataatttgagtgggtctgattctggtttattcctcagttttggagaaatcactgcaaatacagttcaattgtagttcaggaagttttgatgttctggaaaaagtcaggagacctctacacctcaaagttttcagataaaggggctacacgctggcagtaaattatcaccatgctcaccctttgccatgaatcctacaaacagctccttggtactcatcccaccaaacctctgctgctcctctgctgtaccattagtcatccaatcaaggactagtgtcctcagcccattgaccaagaacgtgtgacacatcagtaaaaatcacaaggaatgtatttatcacagaactatcaaattaggagatctttaaaatcccagaaggttcttctatccataatcagatttgagctaattttgacacagacatgcttgtgctttattcttaaattagacaggatttggagaaccccatgaagctctagattccttaggaaggaaaattgtaccaacattgttgcctggttggaactaagtcttccgtgctaagccttgtgaactgccctttgacctagaacccaagaaaaggataaagactataatgggccaattagtagaaaataactcatttttcttcaatcctgcttgttaaaactccaatggaatgaactgcagatttgcttctgatctgaggctaccaacaggataattagaaattgtgtcaagtgatgacaaatgcaagtaaaatctcctttttttgatgagtggtaatgattcttaagttatgcaaatttaatattttaatgagcagaactttcgtacttagctttaatatagtaatgtcagtggcaaaggaaaagcatggaggtaggaatatttttattattgtcagtttttttgggaaatataccaaggaagtgtatttgctaaatcttttaatttcaaaattaaattctcagtaaaaatgtaagactttaaaaaggatagagaactaaagtttctctacactgggacccaggtgttgtgtggggtctcttgttgcagttatctgactctttatgggttttcatctttctctgcttttcagctgtgctaaaattccacaatttgcagaataagtaattctcatccacagaggttccaatgaattatgtccagtagaggtatgaaaaactattactgtgcttatatttgtgttattgagatttgtgtattcattttaccattcataattacttgtacatgaaggtatctgtcttcagattctcccttgaataatttgttggctggggaaataaaagtgtggatagattctcataaattactcttaagactattttgagctgggaatattattcagtggtaatgcacttgcctagcataaataaggccctaggttcaatttttgcattgcagtgtgtgtatgtgagagcatgtatttgtgcatgagcacgagcatgtgtgtgtgtgtgtgtgtgtgtgtgtgtgtgtgtgtgtgtgagtgagtgcgtgttaataatctgttttctgtggttagaaagctggttctagtgtttaagcatgaagatttttgtggttgtggatacttgagactctcatcatgttagaacacaattgttaaaattctcttgttggctcaaagggaagtcagctctactcaacaaatcatttattcatttcctcagtggttggctagtaccttaacattttccatctaagtatcaaaaaggtagtgttagttggatgtggtagtgtacacttgtcagcccagcacttagaaggtgtggcaggaggactgccccaagtttgagggaagcttgggctgcagtgtaagttctaagtcatctagggccgcagagtgagactttgtctcaaacaaacaaacaaacaaacaaacaacaacaacaaaaaaacaagagcaaggaaacaaataaaatgggccagtgtcactgagtctgtaaaccaaaaggggctatgatgtaagaattatgaatgtaaccctaatgaacctgtaatggggtatgggaggactagtgaaaaggtatctttccaataacgtccccaagtggtctctcttgattcagtagatctggaacattcatgcttcattggccagatcctctggggaagtgactcctggtggaattagcttcatacatgttagtttaatgtctgtcagaaagttcatctaatagttcacaagataaaatgattttccaacatggaaacatactttagaagccaaatcagcatggtgaggatgtgaactctgagaaccgaggaagaggtctccttccgcacagagtttccaggttccccctagcttactctttctcacagtctcattggttcatgatttcaataatccatccacaatagaaagatgtgtggattataaaacacctcataaatattagctattaattttagaaatttcctatgtgaaagattcctttacgtgcctgaactactttgattttctattgctgtaataaacaccattttatcccccaaaacaacttgggataaaaaggggtttatttgacttatgaggtacaagggacgtcagggcatgaactcaaagcaggaacccaaagacaggaactaaggcagagactatggaggaatgctgcttactggctttcgcccacctccctaaggatagccctgctccagtgggctgggccctcccacatcgttagtaattgagaaaatgttccacagacatgcccataggccaatctcccagggttttttttttttttgtatcaagttaacaaaaattgatcagtatagcacatcattcaccatttagaaaaaccttgactttcttcggtgggtatctgtgtgggcctttggtaagagctgggaaaattttaacctggctgctgtcaactgtggtagctactgtagcttgaattcccagaatacttttcctccctgtttgaacctgtcttgacctataaaagcatcagcttcctactgttcacgatgacaatgacacagcaggcacaatctatactgcctcagtttatttttggaaaagactatcagcattttcaataactttgtatctcatcgagaagaatatctttcacaaggcaagaatatttaatccccattcataggcccctgtgccttaatctgctcaaattcaggaagggatcttgatacattttgaagcccagtgcagtgatgcactcctgtgtcctagcacttgggaggtagaagcaggagaagcagaaattcaagccagcctgggttacacagtgaatttgaggccagcctgggctacacaagatcctgcctcaatgaacaaaccaatccttctgccctctaaggataccatttctgtagcaagagtttgatttctctcatctggtagtttttgatcctgatcatatatgtcctacaacaactaaaacattctcggaaacttctgaaagtctgatttttattaaaaatcattataatttaaaaaatcttggggctggagagatggctcagcggttaagagcactgcctgctcttccaaaggtcctgagttcaattcccagaaaccacatggtggctcacaaccatctgtaatgagatttggtgccgaacactgtacacataataaataaatctttaaaaaataaaaaaaatcttttctgagggcctggagagatggctcataggttaagaccactgggtgctcttccagaggtcttgagttcaatttccagcaaccacatgatggctcacaaccatctgtaatgagatctggtgtcctcttctggcctgcagggatacatgcagacagaatactgtatacataataaataaataaataaataaataaataaatcttttctgagtgagaataaaacataaaattctttaagtgtgtagatgatcaactcaaaactttccagcaatgtgaccatatacttcaaaataatatcaagttgccctttaaaaagatacctctctctctctctctctctctctctctctctctctctctnnnnnnnnnnnnnnnnnnnnnnnnnnnnnnnnnnnnnnnnnnnnnnnnnnnnnnnnnnnnnnnnnnnnnnnnnnnnnnnnnnnnnnnnnnnnnnnnnnnnnnnnnnnnnnnnnnnnnnnnnnnnnnnnnnnnnnnnnnnnnnnnnnnnnnnnnnnnnnnnnnnnnnnnnnnnnnnnnnnnnnnnnnnnnnnnnnnnnnnnnnnnnnnnnntaatacattttctctaggtttttgttcataatgttttcttgctatgttctttgatgaaatctaaagtgttgggtcactttccaaggagcagtctaatgccccacccccacatgtaggttcacaagcactgtgtccatgtgcatcaggaggacagaggtcaatgtcaagtacctccacttaagtttctgagacaggttctctcattgaccctggagctcactgatttagcaaggctgagtatccagcaagctcccaggaatccactgatcattgcttcccaagcactgggacgatagacacgtttgttcacatccagctttttatgtgggtgctgggaatcaggtccccacatttgtacagcaagcactttaccctgagccacctcttctgccctgaacagtttactttttaacttttgactttagaattttcatgggcattttatagctgctgtgtaagagacacctgaagtaatctagatgaagctattctctctgctttgtaatggaaaatctcattcagaaaaacaacaggctgttatctgttaagcatttgtaaaacaaaataaaaatactcagcataattgaacttaaaaggagccagtcaggctactactgtggaatattcctgtttacttttcagctaggctgtcaatgttgtcttctaggtgatgcatatgattcagacgttaggtgagaactagtaagaagatgattgatttatttatgtgtttattgttttgtggtactggagatcaaactcagggactggtgtgtgctaggcaggcatggacatgctacacaccatggacggagaggaaatatgtgacagcctactactgcagccaagactgcagtgatcctggatctacagacctcaatctccacagagacaacagctcatcagaaaagcttcatctgctccttccaattctgtcttggtctccccttggagcatttgaatgcatgggcacacgcatgtgtacacacacacacacacacacacacacacacacacacacacacacactatcgatttccagaaagttcccttacaacagtgttcttttggctggagcaggggtgaacaggaaggctgttccctctgggcccgaagactggtatttgctgggatcctgtcattagcatccccactgtactgagtggccccagtcttgcaggggtttccaccctgtgacttgatgggtgacttgacaggactttccaggcctgggctgctaaaacctgagctcaggtcctggaaacaataaaagtgcattttcccaagacatttacctgcagaagagccgggaacataaaagcccattctgttatcctactctgagccttcttctcttagtctctggtagaggtggggctgtatcctgtcctgttaattaagggtgacatagaatgtcatctcagcagctgctgggctgctgcaagtgccggacaagaatccagtgacatctgacaagggacactgatttctagcaggagggaaccaggagaaccttttctgcagtgagtccctgagactggcccagaccctacacagtccagtgccgcccagtgctgtgatcagtgaggggcccctgaaatggggtcttttggaatcacaaagcaggaagggagcatgtctttgacccaagctcctcagagagtctgagggaannnnnnnnnnnnnnacctccaggattatcttggctccctagttggtgtggagtggccatctgtgagcctcatcttagccacagcgtgctggaccctgtctcacttaacaggcatgggattgtcacttgtgccttcccttgccatttcttcttggctgtcacagtaatcttgtaatcattcactccctggttcatcctgctgtttgcaactcttctgtatccccacacccttgtcctctttggatgcctgcaatcaaccacaaaggcatgtatttgagtaatgtttcactttgacagagtagatctcacatttgtcagctgaaggtttaaaaatcacaagccctagaccttggtaaatgtacatggctacctggctgatgacttagtgggggaagtctcagtgggggatgggggcatcgtgacaactgagacttcccaatgtcttatctgggggtgataattttgttctcccataggggttggaggaggacccttgctgtggggcaaggttagagcatttttcccacctgatgcatataagtgaacggggagagcatccagcttacccccacccgccaaatcttaggtgttggctggtggagacctgtccattattatcacaggaggtatgggactcactcagacagaaggttctctgaatatctggggcatggaacctacagtactatggctatgagcaggatccatggccatgccagcccatacagtcccagaagcatcagctatctggactgcaaatatccatgacatctatcattaagatgggacagaacttgagcatcaggttattctctaggtggttgtgacaaactcaagccaagagtgcctctgtcaactttttcagattgaataaatctttcaagtttcatggaaatgaaaacatcaaccatctttccaatgtacatggattttacttgatttggaaatatttagaattgtaatgagtttttttttttttttttttcccctccgagacagggtttctctatgtagctttggaggctgtcctggaactcgctctgtggagcagactggccttgaacttacagagatttgcctgcctctgcctctcaaatgctgggactaaaggtatgtgccactaccactgagcaattcttgcttacctatatggagggctgattttacatatattaataggagccactgttttttttccccatagcttccttactctgtagttaaagtgattgctattaatgaataagcagccaatcactgaagacactcatgggagcagtcatcaataaggaaggtaatgagaggaaatcagcatagggttatgcaggaatagtgtccaagcacaaattttattcagatttatcaggacttgcctgttaatccacagaagtgatccatacagcaaacaacaaaccaaccaccatctacttcctgaaaatgctagaaagaaagtagtttaagcacatccctcaccacagtaagcctggaagcaggtggaggttagagagtccaggtctatccaggaatactcaaactctagccccaagcctggatttcactccctggctttgacctcattactgccccaaagcatcacagtgttaaacactatctatttctaggtttcgagcaaccatagaagcccacatcaaggtggctaccttccctggccagacatgcagcatctgggctggtcaccagacaaggcagaactgatggaaggtattgtgtcccgaccttcaggacatcaacctggggcaagagagtcagggacagggaatggggacaagagatgcagaaagaacgaccacaagacaggattctgatcaagtggcaaactttacttttctcaggctagcttatatagtcagcagagcaggatatggggaggggcagaatgggttgtttgtgcaccaggtgttagtataggcaggatattaggaagccacaaagaggatgtttggcagggtaaagagttcatgagtaagaggtccagggagggttgcctaggtgactgctcctgtgggtggagaactggatcaaattgtttcttttcttgagctgaggttctaaggagctgctatgtaaaggttaactatgtggccagccaagcatgacctaggatctcatgccaagccctgagatttggctcccaacagtactggtcaggagccatgtgagcatctgctgaacatcatggttcttttccaaggagaacctctgatcacagggtgcagattctgtctcctttagccactggctggtctctacaggcattggtgttttctggatacactgctcccatgaaatgagtttcacatggtgccttttggcttaattagatgagtgaacatttccctgagctgcaccttggtttaataacaccttcttgcagccaacccaccattctcctttgcttctgaatttcactaatgagctattcactccattttccagatcattagtgagactgtcagaattctaactgggccagtaccagcacccatgggtgatgctgttgctctggcagcccacagtcaaattattgtccattcccattcaaactccctcatatcacaggcagttttattctctctctctctctctctctctctctctctctctctctcttctcttatgtctatcatctatctacctatctatcatctatctacctatctatatttatcaatcatttatctatctatcagtcatctgttaaatatctacctatctatcatctatcttttatcgcatagtatatttcagtagagtcgcaataacctaggctgacttcaaacttgctatgtaattgaggaaggccttgaacttttgatcttattgcctccacttcccaagggtaaggattacaggcatgtgttatcacacatggcttatgtggtgctgggtattgccagggctttgtgaatgctagtcaagaactctatcaaccaaattacatcctcatccagtctatgtactttacatgctacccccccattttttaaaagaagtaatatatgactgtatgttgcataatacgtgtatgcccttgaacgccagcctttcctgaatgctgacagcaggttcatttagtattcatttttgtctattgaagattagaaggatgattatatgcttcatctaaatgccatctcttctttagcccacactcttgactactggtataccttttttacttggtacaagctttaagcttcagcctctctccttggccagctcccagactgttttatgaatattagcaggtcactgggtggctaagaatttcatataaatggttcatatctagcattggaaaatctgaaagtttcatggagaaaattgagaactatttgctttgctctgctgattcccctcactcacaagataaatacaacattaattcggtggcttaaatgaaataatccattaggtgaggctgttttattatttgtagtttaaaattactaggtttttagccatgccactgtgaacatactatattatgtatcataattgtgcatgactttatttatgagataaataaatgaatggaaaaaaattactcagtttgcaggcaacactaacttaaggaactaccagctatgcatctctacaatgcaagccctttgatgtgaccatgaaacattctttttacagtctatggaaatatacttttcaacaacacaggaataatgtaagctgaatgcaaaattatatctgttatcattttgccatgcaaaaatatgaacttggacactaactgaaagaaaaacagaagcctgacttcttgaaaagtaactttgttaaagtattcttaatcttagattaatttcctctgacaccataaagcatttatgcagtttacttataagttctggatatagacttctaaaattatgatacagagagaaaactctgagcatcagtatcgtttaatgtgcccttggggaaggctctccttctgctatatgctaagtgctgtggctttttcctagcaaaccaataatcttttccatacaacaggctctctagactacctgcagaagcaccaagagctgagggtcatgtagttaaatgttatcgggggccagtgagccctttcagaatgctggtcatctcttctgtgactacatggtgtaatgagtctttctctgtcccacgaggcagctcccaaacaatgacatggagacttactattacttatgaaagcttggcagtagcttaggcttgtttttagctagcccttatgacttaaatcagctcatttatattaatctatgttctgccatgcagtattacctcctgtttcctccgtgtctggctggagactccacctttctttttctcagagtcctttcttccctggaagtccagtctagtctcttcttgcctagctattggttactcagctctttattaaaccaatcagaaggtgccttggcaaagaaacaatttcatagtgtaaacaaatattctgcagcaatgtggtccacgtgttcctttgcacactgatgctcagggacgtctccccatggcacaggaggtggtgccgtggctgtgggatgtggaaggagatgttgccccacagtgtgcccttgtgtagagtgggatggcacccggtatagaatggtgagaactgcaatgatgtctgtagagtggagcggttaggacatggaatcacaggtcctgcccattctgtgaggacaactttgaatgtatgatctatgtccccaagagtcagtttcatcatgggaaacatgagtactcaaagtctgttttgtgagctaatgattaagcagagaggaccatgcatacatgagctaggagtaagatataacagtcacactactcctcacacactttcttcatgcatgtcactgaaccctaaagtcctaactttaactgagatgcaccatggaaagcatccaaagagcattgctggctgtgattctggagtagttgatttctgcctcttaaaatagttaatctttactggccacttgattaaagaatcaccaggaagatacatctttggaagtgcctatgagaatgtttccagaaatatttaattgaactggggttccatgccaaatgtgggccacatcattccctggccaggagtcctggactgaaaaaaaggagaaagtgagttaagcaccagtgttcacctctcggcttcttgacagtaaatgcagcaatggccagcttcctcacactcctcctgccatgccttctccaccatgacgactgtattctctaaaactgtaacctaacttttcttaaattgcttcttgtcagacattttatcacagtaataaagcaagtgagtggtaagccttttaagagtagaatttaagtggagttctacttgggtgcttagtcaatgaggctggataccctaaaagtctgggactaaataggatctcctaggttatacctggtcccagtctggtgctaaagacctagaaggttcacaaccttgaaaaatgcatgtttttactcaagatgagcatagcttccatgaaaacaaggctacatctactgtctaacactagaagcattggcagcttcagggatcttggaagccttttcctcttagctagagcaatttctgtagcttgaggtatactgttaactactgatcaggttgctttctttctttctttctttctttctttttttttttttggtttttcaagacagggtttctctgtggctttggaggctgtcctagaactagctcttgtagaccaggctggtcttgaactcacagagatctgcctgcctctgcctcccgagtgctgggattaaaggcgtgtgccaccaccgcccagctctgatcaagtttcttgagttaaaaagttaaatgaaaattggacaacacacaggtaagtggatttcaaacagcattagcatttgcaagctatcagaggtgtttgtaccactacgctgaaaatttgtacctctttggtttgaggactgagatttctctagtgcctaactagagcactgtgttctaaggcccactgccaaccccactgtggggaagaaaaggagtggcagacagtgtaccatgtccaagtgtcatggttttgatttgaaatgtccctgaagcacatgtcagggacttgtctcagttgtgagatgatgggtttctgggaaatgattcggtcatgagggttttgatttatcaaggcatgaacttattgagggatttgtaatctgatggcacatttggtagaccggtgggaaagtgtatcttgtcctttgttccttcctctctctttctgtttcctggctgctacaaatggagcaacctctttttatcatgggttcttccctatgttctgctttgcatcaggtccaaagcaatggaaaaagctgactgtggactgaaaccctggaaaccctgagccaaagcaaaccttttctattttaagatgattttccctggtgttttgtcataattgactaacagatcaagtgttaaatgtttcttggaggcagagaggggctgctcagccaatctaagtctgagccaggctcagaactaccatggagggctgttgatttggatggtgagatggagttttaatattgctcactcaggaaagccagtgatctttgttgactcagagaacaacattccagtggctcaccaagagaatcctgaggggtgatgtctagtgttttattagatctatcatgtacatggtcaactaaggtcaaacataaagtccatttatgtgtgacagtcattttacagatccatttattattggaattacagttaacattgtaccctaaggaaaactggttgttagtcaaggacatgcccttattaggcagaattccaaggtgtacacagtgagaggactgttctgccgtgatgctgtctttagctagaaagagttcaatttgcaatgttatgagttgggtaattatcagagacaatattttattttcaaaagttaatagttaccatactgtgtgcaaaatccaagaagttgattataaaagcagttagtgataaatatctttatgttttaagggcaacatttgcattgagaatcacatctctgttttgcatttatagtaagtgaataaatctgctattgcaaattttccagacaatcgtagggagaccaagacgagttcagtcgttaatcacatcgtgaaactacacacagccaaaaaggaattaaaacccagcaaaccaaaataacacaactggaaagcatgaaacctgtccagtcaattattggatcctagtggtgtttgtctttctgacctccattttctgtaggggtcagaaggacaagtggaaagaaacaatgaaagaaacagaactctattcttagaaaaaaatgtattaagaatggagaaagtatattttatgtgttgaaattgttttgaaaattaagacaaaattatcattcacttagtgtaggaacagcattctgttattaaaaaaagacaaagaattgggtttttgacttaatgaaagcaaaaatttttactcctaagaatatgagaaatacaacaataaaatgctaggtgcggcataatttatcaaagtaacattgggtaattggcttgttttcaaagagtgcctgtcaccagagagctccagcgtgatagaaacacattctttctgttgttgggaagaatctgcagtgacacatttgggacttagaaacacagagatagaggagcccattgacatcagagttgtgttgctgcatctctaattcctttgaatcccagacgtttggggctctagaggaataaccccagaagacctttctgctttcattcttgatttcattttttttgctttcattcctaatcttcctggtaggagccgcaggaccacactgctctttacaggcttcagtgcctgtaaatattttggtgcaatgtctggtacatggtaaggactcaacacaagctgtgtgttactgctgcatttttcttggtcacacttggagtcaccagtctgggtgtggtgttgcattcctgtaagtccagcactagtgaggatgacctggaagtgttacaagttggagtccagcttgggctgcataccgagaccttgtttaataaaaagagaacaaggatcattaagtctcaagaggaggcagagttcttcatagctgtcccgtcaccctatcatttacagatataggaatgttgttggcataggcatggggcaggtaggttcagaactggaacctagattccccaactccaaggtctgcagtgtctctttgttctagaccacagacctttccccactctgtttcaacttgaggatgtgggggtcctctgtggagaactcagcgctcagcagcaagcctcactccaagtgcctgccaccactgaggccacatggatgcctcatgttacagatgagggcaatttatgtgctaaaatcttttcagttattacccactctctaatgggagagattaaagcaacttaaatgagctatattttatttaatacccatctcaccaggcatgtttttctaaccatgatttattatcccagtcctgacttactctgtggaggtagtgagatctctggggctgcagtaagatggttagaatgcttgtgagtggacttggagacgtatttggatgtttcctgtttccatttactgagccctgaaagaaaatccatgaattatctactcaataatcacagccccattagatgcagcttcccatttacaaggagacactaatcttgttttctcctcctttttttttttttttttgaggtgatatctcacactgtagaactcagtatgtagccaaggatagtcttgatcttgtgacaatcttccagcctcagcttcccataagtgtgagtgtgtaatcctgataagatgaggaagaaggggagggagagtgggggaaaggaaaagagaggataagaagtcggaaggaatgtaggaagatatggggaatctgggagaagaaaacaaagagggacacagaggaagagggagaggaatggaacgagacagagggggcagagaatgggaggtctctctgtgttaaagtaatcttacgtgatacgtgttttgtttcatctaaactcagggttcctcccaagaggcatacttggaataggaggctgttcatgggtgtgcttggcagtggtaggttggttttgatttattctgggttccatcacgttaagtaatggtcagacctctaacagggaaatgaattcattcacagttgccatcttggaaagtgtgtagagcttgggttgtcataaaaacttgaaggtgttttctgtgttggctttttcttgctcccctgattccatttctcattgtctgtttttagttcattcttccttcactttttctcacctcatttttaacagtaaacttcgatgttaaaactctctgaattgtcccccaaacaatacagcaatcacgactgtctcgttgtggttaccacaggtgaaactacaaacctcatttttatagaatgacagagcttagaactggaggggatttaagaccatggcagacagtttgccatctgaacaccctctgcgtgaagtggaactgaaatccttcctctcatgtgggcagaatcacagccccaaggtgcccgagagctgtaatgttcccttatttggaaacggagtgttacggtagtgatgagctaaagatgtagcattaggaagatggtcctgggttgtctagttgagctctgaatgcagtcatctgttctgttcgtatgtgtgtacgtatttgtaggtgtacacgtacacatatgtgtggggtacatgtgcacacttgtgaaccaggatgtagaggtgagaatgttgatgtcattcctcaggctctgttcacctctgatatatattttttttacaagtgtgtgtgtgtgtgtgtgtgtgtgtgtgtgtgtgcatgtaagtaagtgtgtatgtggggacatgcactataataggcacatggaagtcagaagaaaatttcagggagttgggttctctccatcctagaaggatactctgttgcatggaactgggttgttagactcagtggcaagtgtcttaacctgttgagccattcccttctgacagactctctctcactggcctggagctcacaaagaaagctatgctggctggccagcaaaccccaggtatcagctgtcttaccttcttagtactgaaccatatcaggaaaattttctttttcttttccttttttgatctattacatcttttaaaaattatttcttttatttttaacattataatcacatcatttccccttccctttcctcttccaagccctcccctccttgctctctttaaaatccatggcctcttttttcgttaattgctgttatatgcatgtatacacctatgttcctaaatataacacgctcagttggtgtagtgtaacttgtatatatgttttctggcagtttttatgtagtttctagggactgaactgaggtcctcatgtttacaaggcaagtcttttactgactgagccatctctacagccccgtgtgcgtttgtctaagagagggggagagagggagtctccacatggaaagaatagaaggtgccatggccacagcgatggaggcagaccaatatggaaggccatcaagggattccaccattctccaaaagctgagagatgctaggactggctctaccgaagtccctggaagggttgatgccgggtcaatgcctaaccccagtttttggcatcttttcagacttcttgtctccagctgtgtgagagaagaagcaagtctgctacacagctccaggtgtgtgggagtttgtcacagcagctctaggaactgagtacactctgaaaccgagttgtcttcctttagttagtttaaagtagttttatattttctggacacagggtctctgtaggagacataaatttaacatatcttacttcatttagcacctgtgatggttagctttaatgttaatttgacacaacctagaatttctcaggaagagtgtctcagtgacggattgtttaccatgggtgggtgtgtgggcatattttcggggattatcttaataagttaactaatgtgggaagaccttgtcagctgtgggtggcattatcccctaggcaggatctaggggttcctgaactgcataagagtagagaactgcataagtgttcattccctttctgctcttgactatgtgtgtatgaccaagtgtctcaagcccctgacactgtgacttccctacaatgatagactggcacctggaattgtgagataaaataagccctttctcccttaagtcactgtttgtcatggcattttatcacagcaacagaaaagaaacttggacagtgttttccttttacccaatggtgtcttttcatgaacaattactcttgacatagtgaaatccaatgtgttagacttttcatttcttgttggccctatttagaataactttaaaaacctattcttagatctaaaatccatgcacaactgatttctatgtgtagagtggaacttggggtctatggttcactgatcatctatttaaaatgtagtctttcccctcctatgctgtaattatatctttgttatgaaccaagtgattctgagaatcatttgggggatgtctaggaagtagatgctaagctggaattcagggtacaagattcatcgtgggaagaaaggtatacggaaaaaagtacagataaagcaggagctgttatatttgttccctgtgaacagaggaggctctgtgatagaaggcgctcagacacagtagagctgagacgattgtggccagttcagtgaagagctccggggcaaagacaccagttgggatagtcctgagctagagaagcagccagaccccagatgcccattgtggtgtccatggttggcacgttcaggaagagggtgccctgggcaatgctgtagagaccttgaagttgccattactcagactcctcacggtagtctagggagacctgagtgaaaaaggtaacactatggcttccatggttcagccttacattgctttctgtacagccaaacaccacagtccccacaggcttccccagagggtgctcagggtgaatgttgggaggctgaacaaggatctttattttgtgactctttgcaatgctgtgacctatactcaaggtcattactcttccattattccttcttaattgtcacctctgcaggtatggggggcttgcctggcattatgacccaaaaccttagtgagtcttaggagccaccacattcctccagcagggaatgcttcaattaggagaaaatagctacatgacagcaatgtaggtggtatttagcacataaaacacattagcttttagttgccatattcttctcagaccagggcttttgtgcatatccacttatggttacattgagcaagataagcaagtgggagtccagtgagtcactcagtgcacaaagtgttccacttgctttattgcataggacacactgtctcattctgatgatcaggccgattggccaagaggcttcctccatttttcaagggacagttccttaactatggcagtggttattggccagtgaatcctatgctttgttcctggtctgtagatggaaacctttaagtgatgggggatgtccttctgtatatatgtttctcttattggttaatgaataaaacactgaccaataggggcaggaagatagctgtggctaggagatgaggagaaataggcagagagggactgcaaagagctgttatgtagctggcaagggagtaacaagtctgggcattctccagtaagccaagaccacatgaaaatacatagattcatagaaatgggttaataattatgacagagctagccagtaagaagccctagtcattggccaacagtttaatagttaatatagcatctgtgtgtttatttggggccgagaagggtggcgggacctggtgggacaaagaaactccagtaacatttaagcatgcagggcttatggtttgggggacaggggctataaaattatccaagagggggtgaaggattattgaagtgggactgcttatgcttccactcattgtttcctgagtgtctgtgctcttccctttaggaattactgcagtgtcttgagctctctggagaagagctcttcctacctctgaggctaatgggtggacacaactgtagctgaaagcttctatgcattccacttagtcttgtagtcacttataagataatcactctgagcttaacattatttataattgtttggccaatggctcaggcatattactaaataactctcacatttaaattaacccattttaattaatctgtgtatcaacacatggctgtggcttactggtaatcctctggcatcttacttctccagcggatacctggcatctctctgactctgctttccttctctccatatctctgtttggatttcctgactggttctattctacctggctactgtccagatcagcttctttgttaaccaatggtaacaaaacacattcacagagagagaggcatcccacattacacaatgcttactgaaccaaatgctttggcatggcatgccaggatgccagcatgccccctggtcattgtctaccctggctttgaagagggccatggataaattctgtgctgtgtggaattggatatgtaggaaacctctgcacagtgatgttgctgaggttctgtgttcatcaaaagccaacagagagcaggaaccacagcctggcctcacccatagtcaatttctgctataggcctttccaagctgtcagcctgtggcatcctggtttggggctggagcagtgtccccacaacaaccaggagagctccaccaggccccagcctctttatatggaagatgcaggatggagccattttttcatccttatttttttgatgcatatttctcttattcagaggaaggcatgtgttacagaggccttcagactggtcagagggggaaggaaaaacaaattctgagaggtgcataagttgccttttagaagatggttgctctcttggtgtcttttgctttggttcaggtttggactgtaccccaaaggcacctgagatcttccagattgcttcacaggaggaccacgtagtctctggtcttaaatggggtggagtggcatctaggtttgaaatctttttcaggttgggggcagcttcaaggatgggaagaacaagacaccagcaggttcctcatcatggacagcctgaccatttgtgaagatgtacatcaaggcttgacagtcaccttggtgacacatgatccgtggctatatagtgagttccaggccagcctgaggtagagagtgaccctgtctaaaagcagacaaatataacccttaaaatatgcaaaattgcagaaggcagagatgaggaaccttcatggcttcccaacccaaatgagttataacacacttgctgaagggacagcagcccactggagcaagtggctctggcagcctttactctttccccccattccctctgccttgctaaaaaccgttagattacattcctaaagctagcaaccaaggtctagtccctaggctgacttctaaagtctgtctcccttctatttagaggcaatcctctgtcccttctggacaaatactcctgcccccttttccttgtccccttcccttcttccttacccccccatctcctttaccactgcatcccagcccattcaaacgcagacatccccctttcctcctcttaaaaccacacccgcaaggtcattttgctgctgttttctacctgagccagcaagcagtcactgtaacttttcttccctgcttaataaagaatctctctgtggaaacaggtgtttggatgtgatttgtgcctaatctggggtctaggagggagaccccacactctgctggggtccccttcatttgcagtggaaggagctgggccagcatctgcttagggctgttcacagcaaaatattcttcagaacagcactgtactgcctttgctgtggctgctcacaggtagttcaggataaagggttgtttactcagatacatggagcaacagatgctgggacaatggctaggttattaattgcatagtttgtctttacaaacaaagatgttcttagctctgttggtggtgttttgggcactggttgacttcaaggatcacatgttctgtttttagctaatgtgttttgtgtgctaaataccatctacattgctgttgtgtagccattctctcccagtggaagcattccctgctggagggaggatgaggctcttaagactcaggaagctcatgaaacttataagactcaggtatagtgcagagctcacaaagtcacaagcctgtccccgctcccccaatcaatgttataaaagctcctagtaaacagtggctaaaaaaaaaggctagtaaagtatcacccatgaggaggtgggctttttagggatgtagctgtttttgatcactcatactcttgtaagtaaccccaataagctctcaggttcatcaagctggacttgagtggaatgtttctttggtttgttgttggtgccttatctgagttaaagaggaaaaaccatacaacagttgcctagtaactcttgagcaagtatatgcctgtgatgaaactggtttgaagaccttgcacctactgttggctcagtgttgtctgtgcctagttctgttcacacattggagcaatgaatgtgattagaatgtggaataatgggccagacacactgtaaaagctaactgatccttttgtttctttcaaaattgaatgtcctactttaattgaaattgtattaaatgatcaggaaaatacccccaacccaaggtactttttaaatccttgtaaataattagttggatctgtgtaacagcttccttttattattattcaagactgcctttattgtatgtctaggacccactcttttctaattaactgctattatctttataagtaagaataaaagccgtagcttttactctaagattacaagaccctacatggtttaagaagtaagcacactttctcttacctatcatgttgttctaaatttgcattttcctcactcctcctttatattgtcagtgttttggatgtagaattctttgatgggtaacaaagaaagttagtattatattcttcaaaccagaaagacagagtgatgtgacctgcacgttatatttagagctattgaaatccaagcacagctatgctgtgggcagagttatttgtcacaagtaagtgtggatgttttggctgtgtgacctgccttggatcatgtgccaaggcagtggtaggaagccaatgtcacactcaggatacctgcagataactaacgctgagccagctgggtacagagaggctttacaaggacatgtgggcttggcatttgtgaagaacatattttcaaatctttaacctccattttcctacaactgcttgtgcatgtacctgtgattgtaaacttgtcctggttcctgttttcttttctcccacggtcaactttctttcaatttataagcaagagacacacctctcattaaaagtattgaactataagtgtgagaactgtggaggcccttcagcactggttctgaaatataggagtcaggacacccccttgcaccaagacagcagccacttagcacagctcagcggcccctgcccatgcttacttctgcacaagggaaggctcaggagtaggactttcaaccggaatcatcttcagtagtaatggattatattagagagttacttgttgtagggattcttagagataaaagttaattcaggatggatggctcaggcttgtcacagcaattattttggagacagaacaggaagagtccaaattcaaggtcaacttgggtcacagagcaagttcaagccaacctgtggcagcatagtgagatcctgtctcaaaataaacacgaagagagcttggaatgtagtacagtggtagagtccttgcctatcatgtgcatgatgctgtcgcagaagtgaaccgtacccggaataagggtatagttggttatttattaaaagagggaatcacttacatgagaaaccgataaccagatagcactccgtgaatccagtctcagcagcactctgagacccaactggaaccccgaagagagcagggagctccttctctcagccctttattcagccacctgtgcacacctgtggccacaccccaaatgggcgtggttatcggcacaggtgcgcagatctctccctacatgatgctgggtttgatctccagtaaaacacacacacacccctacctatcatctatccatccatccatccatccatccatccatccatccatccatccgtctttctttcttttcctccaacgagaaagcagtcttgtttgactacaactacaaagtctaaggacatttatcagttaagtcgatggtagctattgcccgtaaatcaggtgagttaatttacagctccaagactttggttaaaacacaaagaattttagctgggagacagtttctgtgactatctcatggtatctatagctcaagtttttttgaataaaggtcaggagaggttcagagacatacctcccttccctgaattgttcatagggtaaacagcttttagccaaaggatgagagaaataagcaccaggatttagttagatctcaacaagcccctggtggacttcaggagtggagaaggtgactaactctaagaatagggtagcaggttacttagcaagtggggtggattctagctatgtactttcaacaaaatggacagattgttgagctgttggcctatgtgtcaacaaatgcacacttggatataggtcaccgtgcagtactgggaggtatgtgagatggagagagtttaaagacttactatagtcccttcttttattctcattggttcacgaaagcaaccaataaagaaaaaaaattagagtaggtgcttcatgatttctttttgtagcaacaagtaaaaataacctgggatacaataataagtacttcatacccgcttcctgcaaacaagctctcaaatggtcagaacagcctgttacagtctgaacattcaatcttgaaaaatgagtgtgtcaaaaccaaacttctgaagtttacttggcggtggtggtgggggaggtcttggggaaagtgagtcttgaggttggagcttatttgtggcttaaaaaaagcttaaaaaagcttctggagctgcaatggcttagcagttaagagcacttgcttttgcagagaacctgtgttcagttccctgcacacacagaacatctcacaactatctataactccagatccagggaatataatgccttctttggaattccttggataccgggcacatacatggtgcaaatggatacaggcatacacataaaaaaggctataaagggttgtgaagacacaatgagaagatgttatccatgagaaagtagatcccaccacacactaaatctgatgggatcttgactatggacttctaagactccagaattttaagaaataatcactgtcatgtgtaagttgactaatctatggcattttattatagcaatgcaaatggatgaagataacaatccacaaccatcttattaagaggtataattttatatttaacaaaaatcataatgtatttatatatcacttgtaatgacaaccttaatctgtgataattttttaacactttatagccttttccataaagaaaactcaacttgtgtgtgtactttgatgtagagaaatgaaataataaaaaaatggatttcaagcatggaaaggacttatactaaaatagagtgatgttgagggacgttggttatgtggtatcttagttagggttactactgctgtgataaagccaaaacaacttggggaggaaagggtttgtctggtttacacttccatatcattatatacatcatcgaaggaagtcaaaccccaaactgggcaggaacctggaatcaggacctgatgcagaggccatggaggaatgcttactggcttgttttccatgccttgctcagcctgatttcttatagaccccaggactagcagcccacaatggctgggccccacacatcaatcactaattaagaaaatgttctacaagcactttctcaactgagactccctcctctcagatgactttagcatgtgtcaagttgacaaaaaactgtccagcaatatggattctaggaaaagagagaatataagatgaagttgtttacattcatataaatagaagagcaagggctttggttggtactctgtttagacaccactgtgtgtgcttgttaacagtagtctttttagtagtagtagaagtagtagtaggaggagtcttgagtagcctttactaaaataattttaaaaactgcgccataaatggaaaagcagaaagggttttatttaaagagatagcatgagacaggcaagagtgtagcaggttactttgaccagagtgcccaagagtactggctactgtttgaggctttcttttttttgggtctcaaagaagaagaaggggttggttgctaagtgcatatggttatctgttttgattgataaccttgggtcatgtaagcctcccttacaatgatcccaattttaacaatttgaatgcccaatcatgtataggcataaggtgattaaaaggagatttctcctaaaagttcactcagcaaacacagtttgccttactctcctgcatcccaaactggttcaggatgggttagcccctgcctctggttccagatatatcaactggatatttctgaatggaaagtggagggatatgtacacagctatgggcaggggaggagcccagtgacatggaggggttgtatagctgaagacagggaaggattttatgttgggaaagggacttgggtaacttaagccaagtctcaggtcaccaatctacactatgcttacccatctcacctaaaaagagttataccactgtttcatgttgttataccagcacctacagtccctacagcacttacagtggtggcctttcaatgaattgaatctaggatgaaaactttttttaaacttttatttatttacgatgtatacagtgttctgcctgcataccaggagagggcaccagatatcattatagatggttgtgagccaccatgtggtttcttgggaattgaactcaggacctctagtagagcagccagtgctcttaaccactgggccatctctccagcctctaagatgaaagctttaaaataccaattttaaaaagcaaaatctagcaaacagttaaaacattttgggaaatacatgaggagaaagttcaaagaagtgggggggggtgagtctaaatttgataaagtgtccagaggaatctgtgccaaagaaaagaaaacccttcaatatggattttattagcaccctaggactgctataatgaaccatcacatactgagttaccaaaaaaaaattgctaagtatatcaaactgcagatttgaaggctagaagtaagcaaacaaaataaaaaacatcactgtttatggaaccatattccctctgaaggtaccagagaggcaaatgtactatgcctggttcctcagctgcaaacaggcaggcaggcactccttggcttttagatttgatacttcaatcatgtagccacatctctgtgtctttcatcatcttatctctgtgaacatctgtatctagattttgtaaaggcactatcattaaaccagagcccaatttaaccatccttagtttaacttaattaagcctttaatggacccaatttaaaatattgtaatagtttgagatgcttagtgttagaacttcaccatgtattttgagggggactaacagttcgccctagaactttgattctaagttttccaaacaaatcgtcaatgaaaccaaccacatggagaatataaaatgctcagcatctaagcaaaagtaggaaattaatatatggaaaacagcagtcactgtggagatctgccattcaccccagatggaatgttagcaaaataaaactttgtggggagtaaaagaaaaaaaagaaagaaaatttgtgctaatagtgaggacaataactgggagaaagaaactggtctggcgaccagtttccctaggccaaactatgaagagggcaagcatgaaaccatagtaagctgggtaatatgatcacagactgagaatttagacggtctatgccatggagactgttctattactaaaatggcctttcatgacgcttccagcattcttgggcactaactgagaaggatccatggaaacacaatcaaagggcaaggaggtgtgagagttggagtctgactcagctaagcatgttagagaagacctttgtaggagggtgggagaggagaagaaaggaggtgaggcaatgtgtccaggaaattgaattacaccattaagtgagaaacaggaagactctttagagtagaccttgatcaaatttctgaggaggcagatgtgaaatagcacatcaacgtagcatgttgtaggtgaccaagcaatggaagcatgaaattaaactattatttttggtctttagagacagggccttgtactgcagccagatctctctagagctaacagtattcgttctgccttagcctcctagtgctaggataattaagtcaactgtaatgtatttatccacagatttattagataatcaacataaaccctgaatagcacttgtttaaaccttcagttaatcagatggtatttacaagccacacaaggacattcattgctttgggctccgtatccttggtttgaaagataccaacatactctgtgatttttataagtggttccatttaataccatgattaatgagatttttaaaaatatttacagacaataaagacaagtaggtcactgtagaataaccataaattcttctcttaccacaaagaagtgatgtttttattttcctagactttatgtttctgccagtctgtgcccttttctgtcctgcagaattcagtagaggtgaaaatgggctagaggtgtagcgctgtggtagagtgctcacttttcgtgtgcaagaccctgtgttcagttttcagcaccgtggggaagaaagaaaagaaaaataaggatgggacaagaatctttctacacctcttcctctctttgatccctggcagctccacatgaacaagctcagatctcctgctagaggatgagaagataaaggccacatgaagcaaagatggatggccctccatgagtcctcagacctgtgaagaagctagttgaagtcagcaattagtgatcttgcagcagcccaaagatgcaccagtgacccaggatgagatggaagagccagccacacagcagaacacagccgcagctgctgagccatgaaatgctgtgttaggaatatcctttatctttagttttagagctatcaagccgtgagtaaaagctcacaggtccatgaggctcaggataaaatcttgttcacaggcacacagctaactggtaccagaagcttatgaagacaaacatggtaggagactacctccctaactttactcatactcaagatgctcagttttacaagagctgatatggggagtttagaattttaaaaatacataggttatagtctgacatttatggtacagttatgttgtgtgacaaaacttttcctggggagatgcaacaaacacgtctactaaccccagataggaaacctcggcagaccaaagtatggataacaccaatgtacaacttgatgaaccatggattttattggggttatttacaggaatgtgggtgaggcttacttataggagaagaaatgactcaaagacagctgcatcaccacagccaaccccagcacagacagcagctcacaaagaggggaacctggagcacagtgcacagcctgcaggcagctcaacagtttggagagtgtcctttccaggtgcctcagctggtctaactctctttcaggcagctcatctggtttctacttcttccaggagctggtctggtctcagtctcctttacatcttggcatggatgagagggactctcaacctttattgtttaccctggcagggaggggcctggtgaatctggtcagtttcaggaattcctgaagctattttgagttgtttaccttcctgcttaaggagcttccctgtaggatggattgtttcaattttggaggaaactattacacaagttataaaagcttagattatccagaggaaaacataagagacttttctgattcagcagcacataaattctttcagttgttttcttactaccattttttttttatgtagtccatgctggcttcaagttgtgatcctgctgcctgagagcctgggattataggcttttacatttttcaaaccatttggagccagtaggatgatatatgtctgtaatcctagcattaggaggcagaggtagcaggattacaagtttgaagtatcattaaaaacaaggggaaaaaagccgggcagtggtggcgcatgcctttaatccctgcactggggaggcagaggcaggcagatctctgtgagtttgagaccagcctggtctacaagagctagttccaggacagcctccaaagccacagagaaactctgtcttgaaactccccgccccaaaaaaaaaaaaaaaaaaaaaaaaaaaaaaaccaagaaaaaatagaaattctaaatcataacttaataaaaagttacttatatctaatttggcctccttagattcactatgtagtccaggctaacctgaaacttatcaacttatcttcctgcttttttttttttttacctcctgggtgttttgggtacagacatgcatcaccactcttggtcaggttttaatctttcaagagtaggtaagttaggactagttaagaatttcttgttgctttcagagtttaatgcaattagaaatcctattttatttagagtgggagatttcagctaagagatgaagctgggggtggaggctggcctgcacaccttcaggaactggggctgagacagggctcagtgatcgtccatcccgaaacccttctctgctacaggctgctgcctttgcaagtgtgcgtgaaagaggtgatgaccggaggtgtcaccacagatgcccttgccctctcttgatgcagtggacaggaaagtgttgatgacagggcttttggggggagctttagcatcaagcggcccagcagatgggtaattgaacactcagttgtgcactgtttaaattgtctgtgacctcggggtctggcattaagcaaataacaatgaaatcagatggttgagcgaggctgtcctcataggtgatagggcccctgggtatttggagagcagctcggtcagccaagctgttcttgccatctttcagagcaattgcaacagatttgggcaattggccatttgcaaatcattggccgcacttttgacacctatttcctgaccataagttaatttggagagcaaagctggaacatttctcagacacagagagacagcagtaaatgatccagtggttagcactgaccacaaaatccaacctgatcatggctgatgggtttatctgagttaatgctatgttttatttactttcaatatgagttttaaaatctctctctctctctctctctctctctctctctctctctgtgtgtgtgtgtgtgtgtgtgtgtggtgtnnnnnnnnnnnnnnnnnnnnnnnnnnnnnnnnnnnnnnnnnnnnnnnnnnnnnnnnnnnnnnnnnnnnnnnnnnnnnnnnnnnnnnnnnnnnnnnnnnnnnnnctgacccattcactggccttgtttttatttatttttagaacatatgatagccaatgtgatacaggacaatagcaggaagaggaggagagggtttggtgctaggtagcttctcatttttgatagtacagtaacattttatattcatgccccaaacactttttgacttttcagttaaaaaacaaaacaaaacaaaataccccaccacaatctggagttagaaccacatagcagattttaaattgtaatagtataaaaaactagatcatactagattaatatgaggagtagaagaatttggggcatgactatttagataacattaatcatagcattacatgctattgtgatttgaatgtgaagtgtccccacagacttatgtgtttgagcacatggtcccccgctggtggcgctgtttaggaagttgtgatctatcttgaagcagcttcagggtacagcctgcttactgaggaaagctgcctgttatctgtaggggagaacctccgtagttcttccagcaagaatgggggagggtcatttccagaaaaggaggggtgggccacttctgtaccatccacagtgttctggaaactctgataaatgggttcaaaatacagggggcatctactcagttgtttctccctactcatgtgtggtgttggcttgtggacttggcttggaggnnnnnnnnnnnnnnnnnnnnnnnnnnnngcagctccattcgtcctctgcagagagtgaagcctctgtgagggatcaagcattccttgtctctcacatctcagtgacgaacatcttggccatgagtgctcacatccctacttccacagcagtgtctgtcaaagcaacaacccgccaatcctatcatcctgtgtgatggttaatcttcattgccaacttgataaaacttggaatcacctaggagacacactttgagggtgcctgtggggatatttctagagaggtttagataaagagagaagaccctgaacgactgtgacactatcccataggttaggattctgggatgaataaaaagaagtaaggtgtaagtcaggcgttggtggcgcatgcctttaatccctgcactcgggaggcagaggcaggcggatctctatgagtttgagcccagcatggtctccagagtgagtgccaggataggctccaaagctttacagagaaatcctgttttgaaaaaccaaaaaaaaaaaaaaagaaagaaagaaagaagaagaagaagaagaagaagaagaagaagaagaagtaaggtgaacaccagcactcacctctctctgtttcctgactgtgggtgcaatgtgacaccaggagcctcatgcttcccccatcatgaaatgagttataccctcaaactgtgaaccaaaataagcccctctttccttaggttgctttggttatgtattttctcacagaaatgagacatgtaactaacacacttagtgactaatacacttagtgacttgtctttcctctgcatattgtagaaacccactaatgcattccctttcactatgtaccatcctatatgacccctgcagaaagctttcaaaattaggctccacaaggctttctgagatggcttcattttaccaaactttgtggtttggatcctcaacaggagaatctaaaatggaatttttcttgtctggtgcttttgaaagaatacccttgagatgaaggcctttatgcaccccattgatcagctattgactgttggctgctctaggaaagggcaaccttgacactatggtccttcagttgaagccatctgtcaaacgtctgccagcaatctggaatgatgcggagtggtgaccacagtgatggttcagcagcactgtactgaacagcccttcgctattcttcctaagttgcggctcccatgtgtggtaggtgaatggggaactgtattccagtgtcaccaacagccttttggaacaggataagaatagagcaagagagaaattgtcttggttaatttttttttgatagcttgacataagttagagttatcacagttgagaaactgcatccatcagatcgcctgtaggcaagtctgtagtgtattgtcttgattaatgattgatgtaggaggatccagttcactgtaagtagctccaccctgtgggctggaggtcctgggttgtataagaaggcaggctgagcaagtcaaagggagaaaccagtaagcagtgttcctccatggcttctgctttggttcctgcttcaatgttcttgccttgggtataaggccctgacttcccccagtaatggactatgggctatatgagagatataaagtaaaataaaccctttcctccctcaagtagcctttggtcatggtgttccattagagcaatagagacaaagctaaaacagagaaagaggatgtggaagagaaaaacagagctactccactgactaaaacaatgatctcaggccatttgaagtaaggagagctgtccccaccaccagttccccacagtagatactgccctgaagtctgtttctatgacaactaggatgaagacctcaaaagagacaacttgaggccacactgcactggggttattaatgagatggggaaacgattgtgtttgtcatgtctcatgatcacacagaggtaatttacagtttaagtctcagtgaaaaattgctatacctagagtactagcttctggctcataatgttatgtgcctacagtcccatgaatctccagagactgtgcacatgatttccaaggctttcttagagtccccatgccattccagtgtggagctccatttgcacaactacctgaagttcaattaatgtatgcaagcggggccatccacatcaaagggcactccttgccttggaacctttttgggtacctcagtggtgttgcagaatactgcccccattggagacttggtcagtgaagctccacagatgttgtgtttgaactccaaaggcaaattgttatgttattttaatacatacaattaaaatgaaagcacaactctagtagtccctttaactgaagaaggtataaattgtaggcattttaatgtgtgacgcgtcgtcaagaatgtcatgacgaagcagataagaagctaaaacatcagctgagaatttctttccccactacatccataaatagtaaccatttgacatggagaatcgaagtcagtcattatcgggaaaaattacttctgatctttttctttgcatggctgatttattctcctaccctgtcaagggaagacttttacctcaaaaatattcccccttttaaatttcccacttctttatcccccttgacaggaggatggcagcagctctatcgaatggcaacaagctgggatatgttgttaaattttaatcatcctcctgcccgtgaggctgataattgggcatggttnnnnnnnnnnnnnnnnnnnnnnnnnnnnnnnnnnnnnnnnnnnnnnnnnnnnnnnnnnnnnnnnnnnnnnnnnnnnnnnnnnnnnnnnnnnnnnnnnnnnnnnnnnnnnnnnnnnnnnnnnnnnnnnnnnnnnnnnnnnnnnnnnnnnnnnnnnnnnnnnnnnnnnnnnnnnnnnnnnnnnnnnnnnnnnnnnnnnnnnnnnnnnnnnnnnnnnnnnnnnnnnnnnnnnnnnnnnnnnnnnnnnnnnnnnnnnnnnnnnnnnnnnnnnnnnnnnnntcctccttctcctccttctccttctcctcctccttctcctcctcctcctcctccttcttttatttgttttgttttgttttgttttgttttttggttttttgagacagggtnnnnnnnnnnnnnnnnnnnnnnnnnnnnnnnnnnnnnnnnnnnnnnnnnnnnnnnnnnnnnnnnnnnnnnnnnnnnnnnnnccgcctgcctctgcctctgcctctgcctctgcctctgcctccccagtgctgggattaaaggcatgcgccaccaccagctggccaggccaatcttctttatcagaggcatttctcctctctcctctgccttgttctgtctggtaaagaccccttctttgtggtcctcaaaagctaggtgtagggaacaaggaagaggtcaatggaaactcagtgccgtgatcagctttgctgtgcatctgaaaatgccttttaaaaaaatcaagtctgttaatttgataaaaactgtctctcaatatccttctacttttctcactcacaaatggatgatagcaagtgttctctctgctggtccagccctgcacatttgaggtttccctatgagttagtgttctctgtggcttcggactcactggtccagtcacgctcttttaaactttttgtgtgaattagtgtcctctgtgtctaaagactgcctggtaattgtcacctacatggtttctgcttttcatcccatctctgtagaatttttcttttgcttccatttttgagctctgtcttaacaaacttctataatagtgacaggaattgcactgctggaacaggtcttacaaacatcaaaactcagtttccaattctttacttttaaaagaaaacttcggtaacagggtaatcaagagcattgggaacggctggtaatgtcattggtcaatgggacctcactggccaaaaactccaaaagaggcacccattcctggcatgggactttttgtttgttagcctatggtgcttagcagtggcattattattgtgttacagggtaacttcacttacactttctgtctgtctgtctgtctaatgtattatatgttatagaaagcttctgcagcagtaggcttcaatatgacttcatgaaaaagtgtgtgtgtgtgtgtgtgtgtgtgtgcgcgcgcgcgcttgagtgtgcatatgtgcatgcatgtacaccgtggtgcttgtatggatgtcaaaggagaatgttctggaatcagtgtcctcctttcactatggattctggtggttgaacctaggtcatttatggcttggcagtgtacatgttttctcactgagtcattttgatggccagtgttatcttcatgtctattctttgtttgtttgtttgtttgtttgtttcagacatggtttctctgtgaaacagtcctggctgtcctaggactcactctagaatctcactatatagccccatctggccttgagcttgcagcagtccactcacctttgccccttgagtacggggattacaagcatgaaccccataccctgatgatttcctttttttcttcatatgtatgtgtattcacattttgatgatcaacaccataggactcattgaaacagctcttggctcagcaaattcctggctgttgttattctttttttgtaggagcctgctttacaggctctttcagactccctcttttaacagtgtttactgagtgcctgttatgtgccatgtgccatcctttatggggagaataatcctgtattcataaatgagtctggtcttcctgtacggatgacactggatgaaacacacccagtggatctcagaagtccctgtttctgtgcccatacaagtcaggtagaccaagtcctgggtcagggctaggttgagaaaggtttcatgtatggcgtggaagtgaaatcttaaggactggagaattaaggaatgtcctgctttattgtcaggggtcttgtgctttgttgttttcccccaaagaggatatcctatagcttaactttcaaattgtttaatctcttaaagcaaatgaagatctttgtcctatgcaaaagtttgagaggctaagagtacttcggatggaagttggtgtcctgcagggacacagggacactaacttggtgagctaattctttaagattagcacatagaagaaagctctgactaaatcacctagtgctcataaggcgtgacattctctgctaaggaaatcactcacttgtccttgctctttcccgtttcaaatccctcctgtatactggactcacatggatagtcctgggcatcattaagctgctctctgtcaacaaggtgtgaagttgatgaataagtctccatgttaaactgatgtttgccaactcccttcactttaatatctcctcatgagagttcaggcctaattcacaaaagactctttgcataaggtctagacatggtcttgaccatgggtgccatgacagtgggtgtaattgtagatttttctggaaatattgtgccccactccctcctcccttctctgtgttcctaacagtcacttctcccatcttttcacgtctttgtttaaagatgtgagacttagattgccatgaatattttagtttccttttgaggtagaagttctcctgcctagttgtaggccttatgatgctgatgctaagcctactgtcacaacatggtgattcaggaaagcaatgatgatggatgctcaggagagagtaatttgtatctgtatttggttccatgggaggcagaaagcagctcaactgacaaaacctcctagcttattttctatcagtatatctaaactctgcaacttgatgaatacatacaaaagcttcctatgtttcttgtatgaacgatccctttatcattatggaaatccttatttgtggttccacctgtcatagttacctacagtcaactgccatctgggaatgctgacatttgtcttgactttttcaagagagagactatagtcctttttattacagttaattgttacaattcttcaaattttactattggttttaaaaattaactgtcaaaactttaagttgtattttatcattggtatgtatacagggctttgcacccagtaggtactgtcctctctggtttcaggtatccactggaggcttgtgctgtatctccagtaaagaggagggggactatggtaggtttctagaagttatttctcctttatgataaattttgtgtaatttaaccagcattcatcattttctgcttcctacgtgcaggtgcaatgtaaccagctgcctcaatttctcttacctcccaaccccagatgctagtaatcaccattctactcttggtgtctatgagttaaatattagattacatatacaagtgaaatcagtttgtcttttcatgtataccttatttcatttaacatagtgtcctctactttcatccaggatgtaataaatcacaggattttctttcctgaggctaaatagtatcccactataaacacagacaccatattttctttatctttatgtagagagctgcagaaaaccgcacccaaaagatggcgctggtttccgccttccgccagcccgacggcgagcgctctctgtggtaaacaactccaaatatggtagaggtcatgtatcctcttaattctgcttggagacaacctatcctggcgcgccacgtagggttaggtgattggtagatgtagactatatcaggccccgtctccctcggcctggggccgccgcctccattatacattgtacaaagcaaagaggttcccgattaaactgtgtttgaagaagattcctcggtgtggcgtctttcttgctggtcaagggtggacgccgcatctttatccatttaggttggttccacattatggctgttgtgaagtatttgcacataattggctaggatataggttagtatggtcattatgaaacacaatatggaaaataataattcattaaaaatggaaagaaaacctacaatgtggtccaatgatgatcctactgtgtggtatatatcagtgatggttgattttcatcgtttagctgggaagatttaaaatcaccatagaaagatctatgggcatgtctgagagtgtctccagagagttcaattgaaagaggaagacccaccctatacatgggccacaccatctcatggtgtagggttccaggctgaatataaaggagaaagcaagctgagttccactattcatcactttctatttcctgattataggtgcagtgtgaaatgctaccttgggtttgtgccaccatgcctcccctggcatgatgatgacattctctcaaactgaaccaaaaataaacctgtcccttatcaggttgcttcttgtcaggtattttagttatagaaacaagagaagaaactagcatagtattcaaaggagacaaaatcaatattctggtaagtatctgtgctctatgctttactgtagtgcatgagatgactgcagcatctacctcacttaactctgattctgtagctgtttgaactcctcagtgcttcattagctatctaaaggcaagtgccccagtgctttgtggtgtttctagtgttgatatggtgttgatgagtggtcattagtgattactgaatcaacatggctgccatggctacaggaaatacagtcaacatggcctccctgggctgcagaaaagggatcatcctttcctttatatgtgtgcaaatagatgtgtggttccacctggtaaatataaaacacaggtcaggaggtgttgtacttgtgcaacattattagtatggtcagcaaaggagaaaggggaggcacttgtttatgtaccaagagtattgtaacaacataaaccaaaatatgataatgactaatgtctccgttcattcgctaaagatcagctacttagtaattattgtatctccagtattctaacttcataaaacacctgggatatttctatgatctcatttcacagatagggaaagtaaaatataggaagtctagtgatcagcctgtgatcacatgacttctaagtggtagagctgaaatttgaacacacatagtctggtcacaagttcccaagtgcttttaactgctacgtgctggctttctcaagatgacatcagttaactgagtttaaatctctgagttttaaatactcttagtataatatgataataataataataataaataaataataaataataaaaagaggaagcacttaaatgcagtaggtctttcttgggatcaatacctactggataaacaactgtgtaatactacattgtgtaaatgtactgtgtttctttgtccattctttagttgagacatctaggttatttccagcttctggctgttatgaataaggctgctatggacatacttaagcaagtgtccttggggtaggatggagcgtctttggggtatatacccaagagtggtatagctggaccttgaagtagatcaattccaaattctctgaggaaccacttcttctaaggaactgagggaatactgatttccatagtggctggataagtttgcactcccaccagtcatggaggagtgttccccttgctccacatcctctccagcatgagttgtcacttgtgatattgttcttacccattctgacaggtgtaagatggaatctcaaagtagtttttatttgcatttccctgaggactaaggatgttgagcatttcttcaagtgtttctcagccatttgagaatcctctattgagaattctttgtttagatctgtgctccatttttaaaattggattatttggtttgttgatgtctagtttctatatatttcagatattagctctctaccagctgtggagttggtgaaaaccttttccatcctgtaggcagctattttatcctgttgacaatgccctttgctttacagtttcatgagatcacatttactaattgttgatcttacagcctgtgctactgctgttctgtttaggaagttgtatcctgtgccaatgctttcaaggctattccctattttctcttctgtctggttcagtatatctggttttatgttgagatctttggtccatttggacttgagttttgttcagggttataaatacagatctatttgccttcttctacatgctaacatccagttagactagcaccattgttgaagatgctatctttttgccattgtgcctttctggcctctttgtcaaaaatcaggtgtccataggtatggacatagatttgatttcattgatcaatgtgtctgtttttatgccaataccatgagatttttttttattactatagcattgttgtaccattgtgggagctcgattcctttacaattaggaatgatgatacctctagaagttcttttttgttcagtattgttttagctattttgggttttttgtttttttctatattaaattgagtattgtcctttcaaagtctataaagaattgtgttggaattttgatggggattgcattgagtctgtagattgcttttggttggatggccatttttattatgtaattgtactgactcatgaccgatctccatgggagatctttctactgtctgatatcttcttcaatttctttcttcaaagacttgaagttcttgtcatactagtctttaactttcttggttagggttaccccaaggtattttatattgtttgtgaccattgtgaatggttttgtttccctgatttctttctcagcccatttgtagataggagggctactgagttaatcttggatccagtcactttactgaagatgtttattatctgtagaagggtcgcttatgtattctatcctatcatcttcaaataatgatactttgacttcttcttttccagtttgaacccccttgatctcctttagttgtcttactgttctggctagaacttcaagtaccatattgaatagacatggagagagtggacaaccttgtcttgtttctgattttgatgtaattgttttgagtttttctccatttaatttgatattggctgtaaacttgctgaaattgcccttattatgcttaggcatatctactatatctctaacccctccaagacttttatcatgaagggatgttggattttgtcaaaggccttttcagcatttaatgagactatcatatttcttttcctttcagtttgcttatatggtagattacattgactgattttcctatgttgaaccatccctgtatctctgagataaagcctacttgatcatggtagataatctattttgatgtcttcttggatttggtttgcaagtattttgttgagtatttttgcatctatgttcctatggtctgggcattagggtaattatgatttcataaaataaatttggcaatattccttctgtttccattttgtggaataatttaaggagtattgtgtgctagtttgaatgtgattggcccccatgagctcatagggagtggcactattggagttgtggtcttgttgaagtgggtgtgtccttattgaacgaactgtgtcactgtggggcaggctttaaagtctcttctgcttaagtttccctcagtgtcagagtccatttcctaatgctttctgatcaagatgttgccagcaccatgtctgcctgcacactgtcacactccccaccatgatgataaaggactgaacctctgaactgtaagctgccacctcaattaaatgttttccttttgaagagttgctgtggccatggtgtctcttcacagcaatagaaaccctaacaaagacatattagtattaggtcttctttgaaagtctggtagaattctgagctacaactgtctgggccttttttcttttttctttctttacttttttttttttttggctcagagacttttaatgactgctcctatttcactagggattataggtctatttaaattggtgatctgatctttatttaacttcagtaagttattccaaccccacattgggtgtcaaaatattgtttgctttcctcttttggctctttgctctttgggttttttgtcttttgagggcctgacacccagctcccaaataaatcacacacagtgaggctttagcctcttttctttcttataaatgcccggccttagcttggcttctttcttgccagcttttcttaacctaaattatcccatctaccttttgcctctggactttttccttttcttacttctgtatgccttactttcactcttactccatggctgggtgggtagctaggtagctggcccctgacaccatcgtctccttgttttatcttgttcctccttcttctctttgttctctctattctctctgcctgccagccccaactaaccttttttctgcctcactattggccattcagtgctttattagaccatcacacattttaaacaggcaaagaatcacagcttcacagagttaaacaaatgcaacataaataaatgcaacacatctttacattgctaaacaaacactccagagcataaacaagtataacatacccactgcaacaaagccataccccctaatagtgccactccctgtgaacttaacagcaccaattacattcaaactaccacaaatacccttctcatggccacatcttacttgtattttctactaaattgtttgaacacaattatcatggttattttacagttcctgtctgactgataggtctaacagcaaaataaactatgggtctagctgtgttggctactttgctatttaaatatacccttttgttttgtgtgtgtgtgtgtgtgtgtgtgtgtgtgtgtgtgtgtatgtgtgtgtgtgtgtgtatgccaaaattacccttgaatattggaaactttatgtaaatcgtaaagccattccaaagaccatttatacctgtgctgtggctgggtgtgtttgtgctctttcaggtccactaagattgaaggtgtagcccacatggtggcattgcagggatgcgatggacttgtaggggcagggcctcacggggaggtccttggagggggggggatatgcctttnnnnnnnnnnnngggatatgcctttggaatgcaattctcagtggaggtctagagtctggaggtttttttgccctgatggagatgtaatccctgggctgctcctgttcctggttcctgatatttgccatgttgatgggggatgtccttctatgtatatgtgtttttcttattggttgatgaataaaacactgtttggccaatagaggcaggaagataagtgggactaggagacgaggagaattctgggaaaggtaggcagaaagggaggctgtgaagagatgccatgtagagactgggaggataggacgtgccaggcattctctggcaagataacaccatgtagaaatacatagatttatagaaatgggttaataattaagacagagctagctaataagaagccctagctattggccaacaattttataattaatatagtgtccatgtgtttgggatggaagtcgtgggacagaaacaccagcaataccacttcttattctctgaaagccctggggtgaggcagttaaggacagacctcttcaagtctgccctgtgtgtttggactttgagcctcatagaccatgagctacattttttttttttattgcaaaagtagctagtaccaaggatcttgttgatttacaagatcttgttggaatgttcacagggctcttgggtaggccatcagtggctaagcatggctannnnnnnnnnnnnnnnnnnnnnnnnnnnnnnnnnnnnnnnnnnnnnnnnnnncttggtgcgtggcatgtggcctgtgttctcacaaggctcttgacagcaccccaggtcttctggcctgaggcatgtctatttctcttgaccttattcctttctagcagtgtcactgcagatgagcctacgatgaaggcctctgagtttagagtaggctgtggtgaggtcctctgaatttcttgaaagaaatactcaatgaggaatggaatctggctgacctgcctgattgtaggagaagcaggaatgatgggatccataaaggactggcattgctcattttcttaaggatgtactactttcctttgaggattgtctttagggaatagaggctcaccggcttgtgtcagagagttctgcttggttgctctttgagtggttgggtggctaagcaagcctcctaaattccttcatagtgactgggttagatagatcctatctatctatctatctatctatctatctatctatctatctattctacttatctatctgtttatttaacatctatctgtccatctatctgtcatctatcatatacctatttatatcctgtcatcatctgtctatcatctatcatcatctgcctatctattatctatctatctatcttctatctatctatctatctatctatctatcttcatcatcatcatcttcatcatttgcctatctatcatctatcatctatctatttgtcatctatctatctatctatctatctatctatctatctatccatctatccatccatccataatctattatctctgtgtatataaaagactgtagttattccttttagttgaatccccagtgtgtatagtaaagcacggattcttttgatgtgttcagctgaatgcttgtttgaaactgggctgttgcttagacagaactcagcactgaaatgcctcatttcaataaactgcttcttggcttcatttagaaattatcactaaaagctcttccaaataaatcacatgtgaaggagataaaattcctttaactcatgagtagcatctggtagaggttctggctactgtttccttggctcatttttgcttcatgtggattggatgaggcttggcaatttttcatcactcatgtgagtttccgtcaatggaaaataaaccctttcccttctcagttgtaactaatcaactttaggcatctgcttcctaatatatcaccaggaacatgtattgaaagatatcctgtggggtatagctgcttctggttttgctgtaagtgtgccatgcctgtgtatgtgtgtgcatgtgcatgtttccttccttgttttcagtagattacaattctaaaaagtatcgattatttttatattgagaaaacacaggagacacatagtttcttccataagaacataactttaagccaagtagtaaatctttgcagtttcaaagaatttagaagccacattttttttcaacagaaagaaaataggactgtagatataagataatctcaaaatataaatattactttataatccatcaatattcaccacgactcataaacatcaacctagtgatcagcatagtagtttttgtagatgattcaggctagcttgttatagtcaagatgatggtaaccattttgcatgtcattttttcttataaaagcctgaagtagacaatattcagagtagctatgagcatggatgaatttatcctgagcaggctgagttcttgtcctgcaatgttacttaccaggtagatactattgagtgaattgatgaagctctctgtgcctcaatttcttcacatatgcaaaggcagacacactactacctgtactttagaactactgtgaggaataagtgatgtaacataagaaaaccatagagatgacctggtatagaggcacaagggctgctgtaagggttcgggtttgaggttcctgtcttcatcctatggcagttgaggaactattgctgagaggtagtttctttttacagcatttcctgtttctttaggttaaggaaaatggtaaagtctcagcttgacatgtctatgatataaattatttgcgttcttgttatgggatcctagcattcaagaggaaacaaaaacagcttgaagaaataaaaggaatgctgtaccaggaaaacataaagcccagtgctgtttggaatcagatgctgtgtcaacatcggatcctcccagaagggtgtatttatctaatagatgaagatggattgaaaacatttgctgtgcttattctttttctatgatcaacacccttaaacatattgcttccttcatccctctcccttcctccttcctctcttcagtctctgcttatatagttggccttctattaatataacaaatatctggagtgatcacaaaggtttattgtggctcaaagtcttagagacagagttacaggcttcatagtgacattatcactcatgaccagctccatcgttttgggcctcagtggcacatttggggtggggtgtttatggagtaaaaccattttcctcatggcagaaaattgagcaagagagagaagaaagagcaggacctctccatccccgaagggcacgtacccagtgctagaagaaccttgtactagatcctgtctcttggagtttctaccacatttcagaaacactaagtaggggaccaattctttagtgtgtggggctttgggggacattccagatccatgtcataaatcactttgtttattaaaaagcccaaaccacacattttactaattttaaaattatcattattgttattgtatattattgtttgatgtgtgtgtgtgtgtgtgtggggggtgtgtgtggaggggcaggtggccatagcatgtgtgtggaggtcagaggtcaactttgtagagtttagttctctccttctaccttaacatggcttctgggggttgaacttggtttgtcaggcctgcaggataaatgcctttaccaactcagccatttcactcccttcatattttactaatttttagatagataaacattattttaatacaggaagtttttttgaggtaagttttgcaatgtcttatgcatgccacataccacagcctttgttatttatatacaagttgggaaatgcacgtagattttgaagtcaccctcagcatcagtttctactgtgagattttaaagatttaacctccaaagtattggtgaaatatttaaagaacacataaatccagacttctaggggaaggagacaattaaatttatcgtaatttgaaaaaaaataaaaccaaacagccatgtgtgttgatgtaatggcctggggccccagctgagcccaatcaattatcaatatgctttagctgttgatagaactttgtgtaactttaatctttatcagagattttcttcttatcttttagctttaagcaattttttttttttttttacttagaagtgtgaaaagaattgtaatctggggtttagttgtgacaatcatgtacattttagtttatatgattgtctgattttttttaatgtagaattttatctccactatagtttgcctcactccaacaattctttgctaagtcacccaatttataactttgaaaaaaatgaatgaacagcagagaaacattgagaccaagagtcacccttattcttgaaaccaagagctttacagtgtcgtaaggacctctcttctgactgatcttcacaaccacttcctagaaacttcaggacgtaggatgactcatggcctgttcttttgaaagccagcatcctagtgtaggtatttccttatttatgttgagttaaaagtatatgagatgttttaggtcggggaagaagagggcatgtctgttaggacctgactgtgactgtgtagcctcaggccagtggttctagtttttcatcttgaagatgacagcaatgaaaggccatttctgtttaagccaccatcactgttccttctggcattcctataaatttttttataaagctgcagagatgcagttctttgaaacattgctgttcttcccacagcaggtgagaactctgaggctctacttggtgttaggatctgggagggaatctttctccaacctagaatgttaaaagacagtcattgatcattcagtgaaaacccatctagttatcacttccttcctgtgtattagtgccttgcaagaaactaaaattctttcaaaattggcaagcaaaaactggagactcactggaaggatacaggagatcttacagagcctgaatgtgggtgtggggtactagtttgtagacagaacaagtggaaaagtctaactgattcatgctatgcctcctctaggccctgagaattctttttgtcttttgtctaggtggttttcatttccttttttttttttcaaagaccagctttcctattttgtgagagtggagtggcctctaacccagctttgcatggcttctctgagaaatgaagtacaggggctgggctgatgcctcagttgttctagactactccaaggagccatttctgtcacccatgaacatgaacacacacaagagactgattgcctggcatgggttagatggctgcttacacaatagtgggaaagagatcctaatacaaagtacaaagataaaaagtgtgtgcacagtgctgtgaggcacagcccacaggatctcatccaatgggggaagcttagctggagcagatcctaatagtcaactaaaggctccaggaagaaagtgcaccataactctcacgaggatggatgatttccagatgagtgagtgtggcagtggccactcaggctgagtcatggggaggtgcacaggtgccgagtggtggagggggctgaaggcagtgtcaaacctgatagtagatataacaggtcttattttggccaccaaccagctcccaaatcatgacatggatacttatcattagttatgaattcttgaccttatcttatgcttgtcccactagctcttaaaacttaaatcaacctgtttcttttcatctatgttttgcttcagggctttttacctttctttaatctgtatgtcctactctgtgtctgtctgtctgtctgtctgtctgtctgtctgtctgtctgtcagctgcctggctggctggccctggacatctctgtcttattctttttttcatctctttcttttctacctctatttattctctttgtctaccaaccctgcatatcccttctctgcagctattggctattcagctttttattagactaatcacgtgccttaggcaggcgaggtgaaccagcaacacccctttacatagttataaagtgatatcccacacagttaaagtaatattccagaacaagtggagggagctggaggcagtatcaaaagaactcttgtctttggcaacagttgtggttgcctttggcttctattcccatgtttttaaaaaagagttgtatctgtgttagaaagaatgtgatatttaaaaacagagattcaaaatattcaagccttttcatgctaatgataatactttttagaaaaaccataagagttttgagatttttaaaatcacatttgagtcctgcatgtttgcttgctgttgatagtctcaagtgagttcctttatatctatttgtatcttgaaggaatttaatatttaagaaatggcatcaggagcctttgtggtatgattgattttatgtcctgtgggatggagaaactgtgctattactcatacctcgtaattgatttaaggtttgaaaccttaattttcttctgaagaacatgaagattaatggaaacttttcttataatcatttctgaacatctacagctggatgcatttggctgaagggagtactgaccagtgaggtttgagacccgagttctaagggacatttgccctttcaacgtggataattagaaacaaaatgaacacacagctatgatgtcttatgctcctgctctcatacaggtattaaacacacattgctggtttccaaaatctatctttctttatcttgataattttaagattgaaatagcagcttatttatgatgataaagatgcatctggattcccttgcctgggggaagcaaacagggcatgtgtttcattggttcttctggggaagattagaacaaggaccatttattgatcatgcacccacctgcatccttcacatcattcttgagtacctggctgatctgtaacgcttagctaattgcatggtgtgggatttaactcctgcctgttgcatccaggcagctggcaaatgttgtgctagaacaggtgattaagtgattgcatgttcctggccaagaaaataagcagaagcaacacaaatacttttcttttccgcttgctccttcggaagttctgaaactcagtatctatgttttaagtcatgtggcaagcacagtgcagcattgggttgcatatactgtccaccatgaaataggttatgtcagtgtcatacaataatctttgtggagttgactagtttttctggaattggaggtcaccgagaagcttcatgtctagtaaatgtgtgacatcatctttcaactcaaaatttttgggttaactttttcatctctttatcattgttgggaagaaatatgctaaggagcatttatattaagactgaaaagtaatgcctctagctggcacacaccctgaaagccacacttgcctaggatatgcagagctcagggatattatatgatttgcttggcatcacactgagaaagtagggtgcttaggtatttgaacttagacccagatttcacaatgttgtcagccctatatttgttagattgaacccttgacagctgggatgttcagtagttgcaatgggtaatcctcctccatattgacaggccttagagccactgtggaagcacaactcatcagtgtgatggtgtttccagaaaggttaaacttaagaagaaagacccaccctgaacgtgggtggcacctttctactggttggaagaaggaagacctgccctggttgtgggcagcaccgtcctattgtttggaagaggaagaaggaagaacgtgggtggcaccatcctattggttggaagaaggaagacctgccctcatgtgggcggcaccatcctattggtttgagctctggatggactaaaaagggcaaagcctgctgagcaccagtgttcgtcttgctgtggttcacgattgtggctacagctacttctggctattatgctttccccacagggatgagtagtctctgacaaattgcaagacaaaagaagcccctccttccttaggttttttggtcaaatgtttttttgttttagtaataggaaaagtgtctaacaaggcaaccatggagagcattgtttgggtctatttttctcctcatcctgtgggtcctgggtggatttggcctctatccgacactcattagtcgctgataatttgctatagtctcactctcatcatcattgggttggagaacagtgagagtccacagtgcagggccttgggcttagcaatttccagaagctccattaaactccggagcaaaatgggaacttcatcgcactcctccttccctgtaaagtgctaactcactgaggaattaaatctgggtcctaatagcttatggattttttttttaaagatcattctgttcctctgggggagaaaaattacgtacaacttttgtgagggctggatcttttttttaaggttataattactttacaggcttttggccaggattttaaagtaaatgcatgtctgaacaagcattcagtgtgggtaaagtggtttaacagcagagttaaggtggtgaactggtatgtcgtgcgttaagctttctttaaaaaacaacaacaacaacaaaaacaacaaggcaggtaattcaagtgagagtaaagggtaaatatggcctggtatgcctcctgtttgaaatgaaatgtcctgagatcctatttttatatttatatgtttcttttaaattttttaccctagaacactatgttcctttttaaaccatattttaaaataattcttccattggtcaaattacccatcaaaaaagaggggaaaaagcacatataaatgacacaagtattcctcatgcctcgaaagaatgattttagacacttgcagtttctcttcctgtccccgcaggaagacagtgtgggtatctgtctctgtgaactnnnnnnnnnnnnnnnnnnnnnnnnnnnnnnnnnnnnnnnnnnnnnnnnnnnnnnnnnnnnnnnnnnnnnnnnnnnnnnnnnnnnnnnnnnnnnnnnnnnnnnnnnnnnnnnnnnnnnnnnnnnnnnnnnnnnnnnnnnnnnnnnnnnnnnnnnnnnnnnnnnnnnnnnnnnnnnnnnnnnnnnnnnnnnnnnnnnnnnnnnnnnnnnnnnnnnnnnnnnnnnnnnnnnnnnnnnnnnnnnnnnnnntcagtccttttttttactatgtctacaatctctttcttgctgctttcccccagtcttttgctttgcatgtcatctataaggtattgtttctgaaatttatctctaccttccatcttcttttactctgtgagataaatgtatttattccacagtatgatggttcatctttattgtcagcttgacttgatcacctgggagacgcacctctgggtctgcctctggcgtttgctgagatgtttaactgaagagggaagacgagctctgaatgttgggtgggaccatcacatggactggggtattggactgagtgaaaaggaaaaagtgagcttaatcctggcatccatacctctctgcttcttgatggcagatgtcatgtgggctgcctcacgtcatgactttcctaccacgataggctctaccaccaaccgacaaaccaaaaaacgaaccctccttaagttgcttttgtcagccatttcgtcacagtcatgcgaaagtcacacacccaacatccctttaaacatgttatcttgtgagaattttcttagtgtgcttgatatttttggggtaaattcatccacatttaaaaacattgtcatctcactgtagataattgtaacttttaggtggtcttataataatgaaaatgcacgaaacatttcattattgcaaatgcatttcacttggttgtggttattcaaggagttacagttctcattttttgtgttctcatttttaacattggattcattgttagtctggatccatattgtgaagaagttctttaaatgtctatgctttccgtcgggcgttggtggtgcacgcctttaatcccagcactcgggaggcagaggcaggcggatctctgtgagttcgaggccagcctggtctccagagcgagtgccaggataggttccaaagctaaatagagaaaccctgtctcaaaaaaccaaaaaaaaaaaacacaaacaaacaaacaaaaaaaacaagtctatgctttcaccttcaaaaggagtaaatcagtgtttgtcacagcaaccagacccctcagtagacgtgtcaacctctgttagttcaaatttcatcttttctaaaggacacttgcctttatagtactagcccatgagtatagctttgtgcattaactgcaccgataattctgtgtataatttggggtagtttcttttttttccccagctttatgagctgggacaatctctcctacattagcattggaaggggtgaatactgctcttctggtcatactgtcatgtggtcaccctgccagtggtgactttcagcatctagctcactttgtgagacatgcattcgagctatctgtgatttagcgctccttcactaacatcatattttttgccaggatgttttatgaaacttgaacatttctgtcagttgaatcacaaatatttatttgacactgatacaatactgaatttcaatgagaaaaatctcctagggtactggctggaaatggaagcagtaggacacacacaagcactctccccaccccatatttgcacccccaagttatgaacacatactatgtgtatgggtgcatattgtcttgatacccagattccatacttggtaacccgtttactccctatcatgctttttataaattttggattaataattgtggagttttcaggctactcttgggtagagcagagaaaaacttgagttgcctgacccaaatgttcccagaggaggttggacatggctatagtccagttcacctttgtgacttatttaattatgtatctatttatttttgaggcagatttactgtgtagcttaaggtggccttgaattttataattcttcatctcagattccttgctgatatgattataggcatgccaccacacctatctgctcactctgatttcttctttcaactctcacacttacaagtcctttttttctatatatatgcacacacacacacacacacacacacacacacgtgtgtgtgtgtgtgtgtgtgtgtgtgtgtgtgtatgtatgtatgtgtgtattgtgttttagtgtaatttttatgttttttctcatttttaaagtgttttgttttaatttttaatatttactctctatagtggattgaaagccttgggctaagttccctctggtgttcttaaacctgtgtctgtgttgggccttctgggtcagtccatgggttagggagccatcattaggaataataatgagtcaataatgcatctcctctcactggaggaagaagaaattactgttccatacaggaaaccaccaggaaagtcaaaacaaaacaaaaccaaaacaataacaacaacaacaacaacaaaaaaacaacatctgtaagttttgatgtggataaggaaaatattttaaatctagctgaatttgtgaatacctgaaataataatggataaaagtattatagacagcattgcttcaaggataaaagcaaagacacttcaacttcagccatgtgacccagggtctgtcaagtgcttagcccctgggccagcactggctgactcacacatcccccaaagctgtgccatatgatatgtgtgacacaggcatgcaaggaagattattcaaatcagaaatctgcagaaaatttccaaaggcagctgccaaggtgacgaagaagggtttcatggaggagtagtttttcagactgtgagagtatcttgtgttatgacgccatggagcacaaatgtcccccaaagcctctggttttaaatcattcaaaggctgtgaaacagattatttgtaataagtctatctttttgggtgacagaaacatacttaaaacaaggttatgcattgaaaagctgataaaagtggtgtgatcagagaattgcaaaagctgagcctcatacctcctagaggagcaatgaccctgaattcactaaagtagtgtatgtggtgaacttttgaagcttaaatacagcatctaccaagagctgatttattttttaaaaggtttatttttattattttgaaattatatgtgcatgtgtgtctgtgtgggtgcaggtatctctggaagccagaggcaccagacccccctggagttggagttgcaagtatttgtaagctacttgacatgcatgttgggaaccacactctggtcctctgaaagaacatcatacactcttaacccctgaaccatctctccagccctaagagacaacttcttgtcaaagtcttgaagggtttttttttttataattgtgcatccctaatagattatagttcacagcctgtagggaaaggagctggctgggaactcttgtctgggcacagggaatagtcttcaggcaaacatgttttcttctgaggggaaaacctcaggtttgttcctaaggtgtttcaacagagtgaatgaggctcaccttgattatcaagaataatttttcctgagacctccagggttcttgatcctgtgttaataatctcagaacatgacttggtgaatctgtttgtgtgagtttggtttctcagatgtatctggttcaattcacagcactagcttatttagggctagttaaaaacgtgcatttgtcccttttgtatacacatcctggacagggttagaattctcaccagcagaacattctattctaggtgttcagagctacatcagggccttgtgcctttttgccacagcatgattcttcagtgacatatagctgtgacttgtgtttctccaaggaccaacaaaaccgaatactgttttcaaatacttaatggacaaggaatatgtctactgtagctgaatgtcatgacatgtacctgggaaggctgaagcaggagaatcccaaatttgagccctttctggactgtatatagtttctgcttcaaaatcccaaagagacaaatacacatttattattattattattattattattattattattattattatnnnnnnnnnnnnnnnnnnnnnnnnnnnnnnnnnnnnnnnnnnnnnnnnnnnnnnnnnnnnnnnnnnnnnnnnnnnnnnnnnnnnnnnnnnnnnnnnnnnnnnnnnnnnnnnnnnnnnnnnnnnnnnnnnnnnnnnnnnnnnnnnnnnnnnnnnnnnnnnnnnnnnnnnncacattttttttttaaactagccctaaataagctaatgttgggacatgaaccaaatgcatctgagaaaccaagctcacacaaacagattcaccaaattatgttctgagattgttaacatnnnnnnnnnnnnnnnnnnnnnnnnnnnnnnnnnnnnnnnnnnnnnnnnnnnnnnnnnnnnnnnnnnnnnnnnnnnnnnnnnnnnnnnnnnnnnnggatctgattgaaagaaacagctattctaacggtctcagtggtagacagcagaacaagagaaaacagtaatgcaaattgctcctgaaaccaaagcaaaataaatttaaatagaaatcataaaaatccccacaacagcagtccattatgaatgtcatggggagcgtgtcacagttgaaaagattaattattcaattccttttgaattcagctggtaattgtttagttagaatctgaagtgttctgcaaagatgcatgcattgaatgaaggcttggcctggagccttggggtgaggtgttcctgggagggtgggaccttgaagagaatatcagaactctggcacttccttcttctgcttgttatttcctggctgctgggaggtacctaggcaggtttcctctgctcctcacacctgacatgatatggtgctttgccacaagcccaaaggcagcagggccatgccactgtggactggaacctctgccaccatgagcagaaatattttcctccttcaggctgatttgtctcactttgtactgttgatggaaagctaacacatggtttggaatgtcttgcttagtttgtaatttatggttttctcataatttatggatgcaggccacccgtctgctgactgacacaactccggtaggtgggaaagctagaaccagaaaggacagttatctgggctcagagtctgtgaccttgatacctcctccttagtcctgtcttccttgggcagctgtagacaggtagtctctggttactgtcactccccatctcctgctcctggcctggttaggcaatttgttctctctctctgtctctatctgtctgtctctctgtctctgtctccccctcccccacactgcccagcgcacctgtgctttctaactggtgcaatttccacccatctctatttttcctcattcataattttgtttgacacaaagcagtacatttgctgctgtttcttatacccaactcccatgactcgttgtaactttcttgacaatccatatcagttacagtttgcttgtttatcaatataacttggtaatttgtattctttcattatcaagctcccggagtggtggtggtagtgcttctttctttctttcctctccctctccttcttcttctcctcctcctcctccttcctcttccagcaattcttattctgcacatgttaaacttgataaataccaattagttgactaatttcataaaagaattacttgccaagaaagataatcttagaacctgaaacaacacacttgtaaaaactttcatgcgtgttgtgtagttgaaagccaagccatagcttggggatggtagggtaccaggtctccatcctctgaataatttcagtggaaagaagacaaatgaatgcaggttttatggccaaggaaaaaggtataaaagaccaaaagcaatgggtggaatgttctggagccctgttggaaatgagcatacttgtttggaaggcataggttagctgttgccatccttaaagcccccaagtacacagccaaggcaacagaaaaacctgtgctatgcacactgatcactattctgtttctctttttaatagcctttgtaataacccaaacttctataaatcatgatattactttattacctgactttattcaagtaaatgaaaataatttagccataaaattggtattagatttagagaatttcatttgtttccttccagtaattggagcacaaggaacaaatactcaaacattctatgcagccatgtaggtttaaatagttgcctagtttcattttattttttttttaattttaagaacttaatttttccttaatgtttaacatcatgtctgaggatgcatttccttcgtgtgtgtgtgtgtgtgtgtgtgtgtgtgtgtgtgtgtgtaggcatttatatgagtgtgtgtttgccagctttcctttccttcaacaaacacctgggatagttaagtttaaagagtaagaattttggttcattatttcagcggtgtctctacaattgattgacctatcattttaagcctgtgggaaggcaacccatcgcggtggaagcccatgtaaagtagaaccatcttcctcatgagatggaagcaagagagaaattaagaggaagaggccagagtgtcatgatcctacagggatgtgatcccggtgatgatgtcctcggacctcccaccaggctctacctcccaatagtgcccacctagagatcaagctatgaacacatgggcctttgggggaaacattatataaattagagatcagatcactgtatgtacctgaacttaactccagctccaggagatctgtcactctcttctggcttcggtgggtactggaacacacacacacatacacacacacacacacacacacacacacacagataaaattctaagggaagagtttgtcttggctttcagtttgagggtacagtccatcctggtgggggagggatagtgttaggtggctggagcaggaagtcaagagatcttatcacaactactcaactacacacacaaagcagagagtgaaaactttaagtggggtgaggctctaaactctaaaagtctacccccagtaaggccactattcctaaaggtcccacaacttcctgaaacgtcaccacaaactggggaccaactgtttaaatatatcagcccatctgggacattgcttaaaccaccacacttttccctgttacaatggactgtgtttattcaaaccatgaaccaaaagaaacgtttccttccctctagccaggcaggtatttggtcatagccatgagaaaaacaaggcgcacacatctttccattgcttgtcagagtcccacattgaaactgaactgctgtcaacaggggatgtgtgtggttaggctgtagagtacagggtttgcgataggaaacacctggaagagaaacagaagacacccagaaaatccagagctggcgtccttcccatacatggtcctatcttacagggaggtggggtaacagacatttctccaggctccacatggaaagagtgaatgtggggtgccacaaagctttaaacacagacactgccgcagaggaagaggagccagagggatttatggcaggcattcctgactttgaagaaagtgttttgcctgatgagaaaattaggtccggacagctcagtttggtgtgagcaatttcacagaagagcagctttagataatgttgatggattcagctctgatggagccggtaaacaaccatgagctctgtgatcacacatgtgggtacagacggaacaagaacttcctcatagcatcaagtcagctcccatggtcttccatcctggccaagaagagctgctatgactccttgtccagaagctgctggctgggccttgtcccactcctcagaagttcggccatggcaacattggctcctgtgccttctcttcccaatgccaactccaaccctgggagcaaacttttaatattggacacaggcgcccagggtttccttgtgtgagttctcctttgtagttagaagttagtgctcctggtaggtttcaaatgttgcctggggacactgggtaaaatgaaagggggctgttggctgatggggtataagaaagcaggtcaactaggagaaatggggtttatttgcaacagttcagtgtttggggctaagagtattaaataccgtaaacatatctcctgcatgtgatttaaatgaatttttcttttttatttatttcttttttatttttcgagacaaagctttatagaccaggctggcctcgaactcacagagatccgcctgcctctgcctcctgagtattgggattaaaggtgtgtgccaccaccgcttagccttgaattttactttttctaagcttgtataattaattaagtaaaaggaaagcataaaataaaaattatatattaaaagattatattatgaaataaccccaaaagttaaccatctgtgaaagttaaaatagctatatctagattattttttgtttgtaaaattaaaactggtttatggatatgtatttctaatttttgtgacgggtggaattgtggctttgttaaaaannnnnnnnnnnnnnnnnnnnnnnnnnnnnnnnnnnnnnnnnnnnnnnnnnnnnnnnnnnnnnnnttggcactgtggtgaacaatgaaacttaagggaagcaggggcatgacagtggtggggtcttttatacagagcagaaagattctctttgttctgtcaagtttcagggaaatcatttaaccaagtcccaaaagctgagcataatttattattatttaagcagaagtctatccatgatgaagcttatctttggcatcttactttttaaatcccctttaagcatcacagctaaaagaaaccgagataataattgtgaaaatttacagagttcactctatggaagccaccagggcaagtgcttcatggtttgcttcatcccaaagggacctgaagacgcaggtgtttctgaaggttttgcagggcctgagagttttgagaattttcttagggccatcctgctaggaattggaagattgagaactggtgttgctggcttggcataattggaacttgtgtgggacagagctttacagtctatgatgggcatctctcagcatggtgtttacaacagcagtccttgtgtccttggtaggtagctagatagggattgtagcctcagagggctttgaggatggacacctccctaatgaagtctacttctggccttgggtggacatgtgatgttctgatctgctccaaaaatgagaacattacatcctattatctcctcccttcagagtcaacccagctgggcctgtcaatcacctaccaggagtccatgccagggaagttagctgatttacttaaagccatgctaaggagaggggaggaatgattatctccttaatgagataatgtacttatccttcccagaaacccctcccttggggcagttgcctgctgagcttccatcttgtagaactgcatgctgcccacccatttcctgagttacccagaaaggcataacttttgcttttccaatctttaatatctttttctttctgatactggacaaagcctgaacttgctttccctgactctgaggtgtctcattctttttttctgaagctccctcccttctgccaagcagctaccatgcttattgatcaccagcactgaacctgcctgctttcttaagggcctccctttgactcttcctcttctctctctccttgaccattgccaagacttacagctggtctgctctggtgtttgtctcccagactctaacaaaattgttcttgacattcctaccaactctgttttaaaattcttttgtaaatgagactgacgcttccctcaaaggaactctgtttttcccttataacatatgcacccaatttgggggttcccagaaattttagaagcattctgagatgctcttaaagtctgcttttctgccaactgtggctgtactgctctgtgtggagggaaaaaatgcccagggttgtagaagagaggtcagtccagcctcagaggaggaaactccatatgtgagtgtaacacaataaataaaaagacccagagacagatattggggataaagcttcaagatgaagataagaaaagcaaagcagccactactagctctcacctctcagctcagaccaatggggtgatctgaaaactgctcccaatgtcactattcctcagattcactcagacttctatgctctccttaatgtggctagaaactaattctcagactgaatgcctctaccctttatacctctcaaatcctgggactaaaggtgtgagctttgattcattctccagtagcctagggtggtcttggactcaagagatccatctgcctttctcctgagtcctggaattaaaggtgtgtgccaccaccacctgatctctatagcttgaggcgggttttgcttactgaatcctcaggcaagctttaatgaatcataaataatatataaccacatctgagtgcacagttagtgccatcacttctttcatgtcggtcataagcagtgaacagtgtttaggacccctcttaacctgcaaacactttgccctctgtccttactgcaagttttccttcacaggattgtcccggaggttccagggaggggagctgccctgttcagccttttcatccccacatgctaggctcagaggcccaccctggaacctgtgactgacagggtcacccagctaccagttgcttcctttcaggtctcaggcatttccaatgtctggtattgtttcttctgtcctttgattctcatgccctgtcacagctgagtaggtcacggggtctagaagcagagccggatgctcatggtgacacaggatgccatttactttatgacttggaattcccacccccaaatataatactgctatgaagatccctggaacattttaacaaatcccccgtctctctcttaaagggcttctatgattgaaataagaaacccatgccatatgtctggtcaattctgaaaattcccaattctctaattgctctgttaatagttgtctataaatagaaagcgatgaaccctcttatgtctaatcctcccaaagcttcattctgatggttccctgttacgataaatctttctgccaaaagccgcccgagccctaccccccacatgtgcagtctccaccagctgcccgagttctgcccgccacgtggatggacaaaataatacagagacatattaggtacaaagctgcttggccaatgactaggatttctcatctgctagctcagtcttaattatcataaatctatatattttataagacttatcttattggactccttattggcgtccctcctagctggtggatcacattgctccggtggaggaagagtagaggggaaaagggacactttcggtttcctttgtttaaatatgagtctccttgctatgtcacttcctgcctggatcaccacttctctactacatttcccagaatcctctttgactcctagtcctgtctaacttgctgtctcatgggccaaacaatattttattcaataatcaataagataaacatacaaagaagcacattccccatcagttccctgagctactaagcatttaaagctccatttctgcagcacatgggtctgtatccaccatggaacacaggtttgcatgtgaagatcagtctaggtgggcaatgatgggtctttctgtcctggttcccttttgcttcaattatgcctgctataaataagtaatgcaacacattcttgcagtgtctagcttccatagcatggtgtgccaggatttccttgctgtgttttgacattttttgaaacttaattgaatttgacaaagttcagcattgcaatgttacacccctactggcccagcagagcctcctagaagactgtagtaaagagggcttgaggtcctgtaccgtgtttatgagcgggattggctcttaacaatactgaagcctagttgtgagtcatgaagatattcggatgtggtaatcttttagtttccaagtagaaacaatagctcctattttcatcatgatttttgtactgggactttagatgccctggcttcctttctgttcctgcttttatcacaagctattaacacttcatgatggtcctggtggaagttaaggctagtgtgctggatacttgacctggaatgaaactttaggattgttaaggatttgaagtacaatgtatcaaagattgttaaagctggtgaggggtgttaaaagggattcaaaaaaccctggtggggaactgttgtggaataatcttttttgtacactctgaagctggctcactcggattggtttaataaaaagctgaatggccaatagctaggcaggattgtttttgaattatgtcagaacccagtgtctactgaacagacagaagcaagaagagcaatctggggtgatttaacaagattggttatttcttcccccttcagcccacccttcctctgttccacccatctatccctggtagccctaggacaggcaatggcaattctaggcttgtgagtttgagtggtatctcctgataccacacaatgtgctcttctgtagtagggttgggcaaacacagtgtttgggcttcctcctccctttgggccagcacctgacagcttggtcaggctgtgggattctgagctggggctgggaagtgttggttcttgtcaatggtgtgggttatagtgggacttgtgtctttctgctggacagcctgttgtttgcattcagatctcattcttggaactgtcctttgcacatttaaatacaagaatgaattttgaactgactatttttaaaaaaattgggcccatatatttgaccttccaaaatctgtcttggttcatttctgaaaactttgaaatgctaagcaagaagaggcagaatatactgctgtacaatcttttcattataaaaaatcaaattagtatctttcaaaaagattgatcatatttttaattattaatatgtatatgcaaatgtccatggaagccaaggtgtcagaccccctggagctggaattacaggtgactctgagttgtctgaagtgggtgctgggaaccaaacttagttgtttttgagagcagtacagcctctttaaactctgagccctctctccaacccagtgactgttatctaaacaaatatgaaacttgggctatagatttggctcaggggtagggcccttgcatagtatgtacaaggctttttgagtttgcatcctggcattgaaaccatatacatccacttttcatagaaaagtcaaataattaagattttgggggaaagtcatcattttatagcatcccaacactcatccccatgaagtgtttttatgaaatagctacttaccaggggcccttcagttatgcttttcacgtacacagatcttatgagtttaaatgagaacttgacagagctacagctggctagaattttagagtcatttctgatagtcttgcctagcatttgtatctgatgtgttcaacttccactgtgtattttagttgttttaagtgttggatgtagtttataaacaaatgataagaaaacccatgataaattttacagggtttggaatggattcagcaaatacctctagtgtgtattccacccactacttctgtttcttcctgagaagtaccattatcttagattttatatttagttttcctttttatttatgattttaacacatatgtttatgtccttaagaatatattgtatgtttttgaaataagtatttggtttattttatttttaatcatatgcatgtgtgtgtctgtgaggggggtatacacacatgaaaatggtacccgtggagtgctcttaaccactgagccaactctccagtcctgtattgtatgtttttgaatgctttgaaatgtaaatcagctgaagcaccattctgtagattcttttgagttgcctttttactcactttctggttctgataatcatctgtggcctttggtttgtccataagtccccccccccaaggccgtttccatcctaagatcacacattacacatatgctgtgctataatcatggggtagacagctgtttttccactggtctgttacaggtagtccttctgagaacttctctgtgcctattgatggaggtgtgcaaagcttgctagttactagtcctaggatagacgtttctggatcataggtcaagggcaccattaacaatattagatgaccttggcatcatgtgtactttgttttgttttgttttgttttgtttgatttttcgagacagggtttctctgtgtagctttggagcctatcctggcactcgctctggagaccatgctggcctcaaactcacagagatctgcctgcctcggcctcccgagttcagggattaaaggcgtttgccaccaatgcctggctccaagtgtactttgtaaaacaccagaacagtattatatccattgaatgatctctatatatttgtcaatgcttgatactgtcagacttcaaaattctggccaactgaggggcatgggatggtggtacatcactgtgggtttggttgtttttcctatgaattctaaagagatgtagcatgttttcatggtatacttttggacactcagatggtctcttcagtgcagttcatgttttaattttttgctcatttttttttttattagtgggttgctcatatttctgtgtgtatctcctgggctgttcctgtctacacagaactccctgggttattactgtctctctctgttttatcaacgtatatttgtattctgctctttctttttgggaggcagaaaaaatactcaatttattttcggataggcagcattagcaagtaaaaccacactgtggctcacacattcattcacagggtatgagaaagccatagctggtgtgtcctctgtgtgcaaacaggcgaacagtcaaaccggtgaatgctttcttacggggttcacttctaatcccagaagaaaaggcatgcccaggcaaaaacccgaaacaataaaattttggtgcaacaactaagaggggaaagtttggttcacaggcttcatccacattctctggagaaatgagtctcttcctcattaaccatcagagcacggttacaacagctgtttaaagtcctgacatatacacaaatgtaataaaaaataaacaaacccatgaaactagccatgaagacatcttgaacatccagcactgctcaccagtactttgactcctgaaattgaagacctggaaatatttgtttttcacaaaagcaaagttgtcactacctccctccctcctcccctccccccccccccctccccctctctctcgggtaaggaaactgaaacaacaacagaaagaatgtggagctgtgacgggaggaactggccctcctgggagtttctctcttaagaagaaacatgcatcaccccctcgcccccatgcagcaggcatgaaacaaacatatcaaatcaactgaggtgtctgctctgatgcctgtccactccagggtctgggaagaaggtcggttgttacgataaatctttccgccaaaagctgcctgagccccaccgccacgtgtgagctttacaccagccgccagcctgagttaggataaaatgaatacagagaaacttgtattaggtacaatgctgcttggccaatgactaggacttctcatctgcgagctcagtcttaattaccataaatctatatattttataagtcttatcttatcagacgccttattggcgtccctccttgttggtggatcacatcgtgtcgctggagtaggagcggaggggaaaacagggcccttcctgtttttcctacacttaaatatgagtctccttgctatgtcacttcctgcctggatcaccacttctctactacatttcccagaatcctctttgactcctagtcccatctacttgctgtctcattggccaaacagtattttatttaacaatcaataagataaacatacacagtacattccccattagtcgtttgtgggaggtgtggggagcaggtggaattcttgggcacccaaactgtttaataagcagcaggaataagtcctaggggccaaggtcagttttcagagggcatcctaccaagggctccaaggttaaaggaaatggattaattttttttgtttgttttagctttttgaggtttctttttattcctttcctgctaaagtacattaaaactaaaacaaccacaagatgaatacagcatagaaaccagttcttcctacacaggtgttcatttacctgcacatagtcaccatggaagtacacagtacactggcaaccccaccctacatcggggtaagtagttgtcccttccactgtggtccattgagtcctaactatttttctctgaaacaggtgacagtctttggaaaaaactatgaggccatacacaacttctagtacatgatttttcccaagcaacaaaactatttttcaaaacctgcttcttccaaaattaaaacaaacaaacaaaaaatttcgtctgttttagtaattttttgttttgtttttttctattttcctaatttttttttcattttttggaaagcaccatagcagcaatcatgattgtaggattgccgaaggctgtgttcacaagcataaatatcatttgcatatcaagaagagaaaaaaaaaaccaggaggaaatggattaagaaaaaaaatggaaaactgaaaaataaagcagaaattctggaatcttgccctgactgaagtcttgttttctttcagaaattgggggaactggtatttgaccacagggtcgggaacattaggctcctccacattctggctcatgccactagcttggaaagtgtagcattgcttacggcagagatgacccccagggtctccttggacttcatggctaaaccatcgctgtggacaatgatgcaccggttccacacacagcaggggccacgctcacagaagttccttggaaaacatgcctctctcccttcacatctggcacagtcacggggttctctatggtgaggtttctgtcctggcaggcttattgttggtccaatatgtgatttagtggaccttcaggttgtgtttggtggggagggctccaccacatgtgtggcagacaaggcttttctctggtgtgcgtctgctcacggatctgaaggccgctggtagatgagttcttcccacaccctgtcactgtggctctactgctagcaaaggtgtcatggaggagggttaatgtgggaaaataccaatacagagccaggtaaaagaggcaggcggatctctgtgagttcgagaccagcctggtctacaagaactagttccaggacagcctccaaagccacagggaaaccctgtctcgaaaaacaaacaaaaacaaaacaaaacaaatacaaaggtatttaataggaaaaaagccttacttacagagtgacctagccagccggtggggcagcagtctggacaccaagcagaaagtgaaactgaaataaaaaccggccacctgaacgcccctcactctacatcaccctgaccacgccctcgcaggcgtggtcaggcacacctgtagccagccactaagcaggcgtggctacagcatcccctacagagggtcccacaaaggtgccgtaaacttcaacttggacataggtgggcttacttggatatattttcaggagtacaacacttttgtttgtagaggatgaccttgtccttgtccttgacatacaaagtcaaggcagagatatttaggagcttcccttttcttttctcagatgagttgagttccacagtagagagaggaccccaaaagagcatatagcctggggtctgaggtagcagcatgcttgggaggccagacatgaatttggggaaaacacaagtcccatcacacttcaagctgatgggcgtaagagacaaggacagtgagctggctgtggaggaaacactggcctgaagcagcttggtatgtagagacagactaggcttgcgactttccggcagagccactgcattgggcatcttataggactaaggtcgcccgagtgtccacattggccactccacagtagagcgcatgggcaatcctagacttggactttttccgtgagctggatcatttggagctgctgctgtagacacaggatctgctctaggacccatgggatgctgtgggcagcttgcacagaccctgatccgtgctccactggttcactgccatcttggcacctcagagcacctgcagagtcacaccagtgtggaccactttgcatttgggtaaatggcttatgtcctggggtaagggtgtcagggcagcctctgtctttaagtaaaggttgaactctgtgcccagcttttccttggagttccctgagatgctaactgctctcctgattgactgatgactgttcttaatgcttgggttggctgactggtagctcgggatggctctgccgaagtcatcggaaggcactggcttctcactgatattcatgatgaagacaggaggattttttagtgcaacattgttgtgttccatgaacctagagagactgaagaacccagcacaacacttcctgcagatgtgagtcttctgctgagccactttgctgtagcagtgtcttctgtcacttcatcacttcatcacttcatcacctctctccctggggagttcactggagcacccggtaccctgtggttgcttgccctgacactccttcaagtgctagggctttgcctgcatatgcctcgacatggtgcacacatcagggtgctggggagagccctggtgactttgcccctttccatcaccagttcctagggttgggaaattttacccctctttggtggtatgtgcgtgtctcaataataccctcttttctattccttatcttataggtcattcttatgacctgaattgtgtactcctgtgaagacaacatttatacattgaaactcaaccccagcatgtgcctgtgtttggagacagccttgtttaaatcttcatttattactatatgctagtaatatatcatttatttcattgtgatactttcatgtatgtatataatgtatgtatataattttggttgtagtcactcctcatttacccctctcttattctgttaatnnnnnnnnnnnnnnnnnnnnnnnnnnnnnnnnnnnnnnnnnnnnnnnnnnnnnnnnnnngcttctgtctcctcttcctcctcctcctcttcctcctcctcctctttctcctctttttcttcctcctcttcctaccccctcttcttcattcttctcttctccccttcctcttcctcttcctctcccccttcttcttcttgctcaaacaattttctgtacagaagcatgggtgagaggcaagttacaggatcctgagtcctttacagtgcctatgcctttgaagaaaatgaggttgccttttaaagaggcaattggacctaaaatgaagccagtagagtgggtccttgcccaatataaaacagtctttatatacacagaggagatgaggacatggggagatgagcacctgaaagtcatggagaaccatttataagaatttaattctgcaaagaccttgatcttggacttttggctccctactgtggaaacatgatttcctattttttaaaagtgattcatctgtgcctgatggtgctttgttttggcactttgaacaggctaatgtagttgtcattttaactaattcctagaactgggaagaatgtctaagtcagtacagtgcttgctttgtaagcatgagggcctgagtccaatccctaggacccaacctgtgcacagttgtaatcccagagctgaggagtcagttaggactcattggccagccagcctagccaacttcttgacttccaagatcatgagagaccctgtctcaagaaacatgctagacatcctctgaggaacaatatctgtggttgtcctctggcctccacatgcatggtaaacttgtgcacacatgtgaattgccaggtatggtattcagtctttcttcaggttcagagctatcagagtcccttgatgcttttggggtggacaactaggctgctgaagttaacatgagcacctggggggaatgtctcattttagtgacttagtagactagttgcttgctccaaagtcaatctcaaaagacatgctctggatttttataaggtgttttaagatcacctttgccctgtcttttaggaattctgcatgctttgactcatagttaaaatgtcaacactcacaaatcttaagaatttacatgtaatgcagaatgatttcttcacagtgaaatttggttgtttttttttttttttgaataagatacatatcccattgagtctggattttttttgaattgttgaattgtaagatttctttcttttctcagatatgccatgtatatttgttgtctagtcttttgatggaacatgtacacaggtaagatagtctcctctttcctgagcagaaaaattatcatacatggtttaaacctagggctggtaagatgtctcagtgggtgagatatggcgccaagtctgacccacactgtggaaggagagaaataactcctataacttggtctctgacctccacacatgtgccgtggcatgaacacacatgtgtccctacacacacataaataaatgtaaaaaaaccctagtttttcattaaaaattgaaatctaacaaaaattttgggtatatgtgtatatatgtgtccatgtgtatgttggtacacatgtgtgtgcatgcatgtggaagccagaagacaagcttgggtgtcattcctctagtatgtcactacctgatttttgagacagggtctcccattcactcttagcttgctcattaggtgaagctggctttccagaaagctccagggatctacctgtctcttccccaaacactgggattacaggtgcatgccaccatgcttttctattttgtgtgggctctgggaacccaaatcagatccctgtatcagtgaagaaagtgctatactgaaagaactatttccccagctctaaaaccttaatattggaaagttaattctatttgtcaagactaattaaattcaaatgctaataaaacagtagaacatcttttgtacagtgacatgctgtttctttggtttttaagtcataggttcacatgaacattgttgttcatgcttagcatcagcagctggcatcctctgactatttagtgccaaggcaattagcatgttacatgtgcatctcatttggttcttgcaatgactatattaggcagtcatctcaggcttgagccatgggggtatagtccttacaattctggagtctgagtgcaggatgtccacgtggccaggtttcacacacacacacacacacacacacacacacacacacacacggtagggggagagagagggaaggagaggagagacagagagacactgactccctgctatcttttctaataaaggtacgaattcttcagccttcccagtagctggaatcgtaagcacatgtatggcagcttgaatgtggttggcccccataatctcatagggagtggtgctattaggatatgtgggtttgttgggtgggtatggccttgttgtaggaagtgtgtcactgtgggggcaggctttgatgtttcctatgctcagcataccacccagtgtgtcagtcgacttcctgttgcctgcaagatgtagcaccgcatctgccatgctctgtggcatgatgatcatgaactgaacctctgaaataatatgtgagccaccccaattaaatgattccctttataagagttgctgtggtcatagggcctcttcacagcaataaaaaccctaagacaccatgccacagcatccatatataataaacaaattttattggccatcatatttctttacaatgcaaagttatatgtacatgttcaaattttaaactatgatcacaaggctgtaaatgctaacatgttttgggtttatgaactccaactaaatatgtatgataaatgcataaatgtagggaaatatggccaaaaattctagacagattttgtagtctgtctagatttgaaatccagattgtcccagttttgtcaccttgcacagtgttcttaacctctctgtatatccagccacctaacaggaatatctagctctcagagtttagctcatagagtcatctgttttaaaaatttatattattttcagttgtgtgtgtatgtttgtctgtattaggcaaatgtacttgagtgtggggcccaaggaagccagaagcacagctccacctggagctggagttacaggccattgtgatctgtttgatgtgggtgctgggaactgaacttgggtcttcgggaagagcagcaaattctcttaattgctgactcatttctccatccctcttaagagaatttgctgagctaaaatatgttcgggagttaaggcccacagtaagagccatgtttgctcttgttcttgtgttgatgcttatacacagactgtaaacttttgttggaaattatcagttactagaaagagtcaggaagagagccaccccaattttccatgttaacctgcacgagcttatgcaggcttgtatctctttctgtgtgtgtatataatataagaagatcacctaattaggtttacatactaatgactcaattttcagttttacattttcatttttgatactccttctctgcattacctgacttaattttatcgaccacctgacatccttgctgtcactttcctctgaaccacacagatttatggattatctgtttacttggcacctcaggaggtttttacactgtaaggtggtggatctttgtgatgttctagaagaaggaaaaattgacctttcttttgtaaactggtagaaatagcttctgggaaagaaaccacaaggttcgtggacctctggctttctcagattgattaaccactgacatcatgtctgtgagcgagtccatgggtggcctctggagaactgactgtgtggtccctgtcactgtgccagcatctgctgccctgaagtctctattccttttcccgcttagagtgggtctattaacaaactggaacagacaaggctggaaacaaatgctatgatggttggacatgtactgtaggttaaattttgtctctagggatcaacctgtccaacatacaacaaccttacagcataaggttgttcccttatgctgtaaaatgaacgatggctttgttcttaggattctcaaccatgtagcttttatgtcttgttttgtgttctgttttcatagaaggctgtgacaaatttcagcagatccaagaagagtcccagaaacagcattttgtagagtggtggccttagagcaccttgttgagcacccaggagttcaggctgcaggtgctccccacccacacgggctccagagagatttttagcctctttttttttttttttaatttcttcttttatctctgctctgctccatcataagatatactgtcattgtcatggttttagcttgagttaagaaaacatccaaacaacaacaacaacaacaaccacccaaacaaccactcactaatatcttaggatggtgcattaaaaattaggcattagaattcacaggataatgccaaaatacctcagtgggtttgaagatctgaaaaccaagatctgtctactgtgcttgctttatcatctaaagcaacccacaaacctaatcccccagtgaacactttcctttctttgtaggctatttacctttcatgtcttctgggctgacaataatctcttaagggttcagctaggttatgccaaggacatttgaagtccaggctggtaacaaacactgggttcagccatcccttggtcttaggagaattgacaactgctgttcttatggccagggccttagagaaagaactgcttcaggctaattggcaagcagcagggagtgcatccaagtgccaagtggcttacaagggccaccacctgcccgctgtatccatgcagactaaaactttcctgcagatgcagcatggtggtgcaggctggatttggagtagccagcctgagaaccttatctttgtgacagttgctggttgaatcaaggaaacagaacttgactctaaagtctgcctgtgtctcttcagagatgggagtgtgtgttcccctgctggaaaccagagtagcccctgagatattggcacaacagcctcttttgaatagaataaccatcaggctaatggtccttctcttgagcaaatgagccactttgtagttgttcaaggtagcttgccatctgccagtgaagggaccatcttcccattttggcagccgtaacagcctagcatgtgattgcctgaccttgccttggtcactaggaggtcagatgcctgccttgtggcaaggaaccaatcagaagttagctggtgatgctatgttttacggctctgggtgtgctttaaggacaagtgcacagcaatgatgcacagagcatagcaatcgccctgggagggcctatgggccataacaaccagttgaccaatcacagggcaagttctccaagcctggaagcacaccagtcctgagcctgtgcatacccctagacactccccttatgctgccctataagatctctatgctgtggctttgaagcgtctttcctagccatcctccatagtggatggatgaaaggcccgagctaatggggttagctcattaaacaactacaataaagcctcgtgctgtttgcatcaagcttttgactccacctggtgattggggtcatcacagtcctggccgagatcctgggggtctgaaccatcggaggtctttcaccaggagcatctcactttcttggcagacgttttcataggatggcaaggcagtcaatagcagcctttgcctttcttcgtgttttatgcatgttacatatcatagagatccattttacaggcagcataataaacaccgagctgttatttttgtgtgtgtttacatgtgtgcaggtacatgtgcatgtggtgtccaccttgtcttttgaaacagggttttcttctttccctgggttgagctagctggccagtgggccctagggatcatcctgtttctacctccctggtgctgggatcacaagcttgcaccaccgtttatgtttttttaaaaaaatccatattttatctggtggctgaactctggtgggttagggttaggctttagggttagggttagttttaaatttaaaggaaaagtttgggaagcaggtaaaagaatgtagggatgttatcccctcatgcctgaaaaagggtagatatagtaagaaattaccaatacagagtcaggtagaaatataagggtatttaatagggaaaagccttacttacagagnnnnnnnnnnnnnnnnnnnnnnnnnnnnnnnnnnnnnnnnnnnnnnnnnnnnnnnnnnnnnnnnnnnnnnnnnnnnnnnnnnnnnnnnnnnnnnnnnnnnnnnnnnnnnnnnnnnnnnnnnnnnnnnnnnnnnnnnnnnnnnnnnnnnnnnnnnnnnnnnnnnnnnnnnnnnnnnnnnnnnnnnnnnnnnnnnnnnnnnnnnnnnnnnnnnnnnnnnnnnnnnnnnnnnnnnnnnnnnnnnnnnnnnnnnnnnnnnnnnnnnnnnnnnnnnnnnnnnnnnnnnnnnnnnnnnnnnnnnnnnnnnnnnnnnnnnnnnnnnnnnnnnnnnnnnnnnnnnnnnnnnnnnnnnnnnnnnnnnnnnnnnnnnnnnnnnnnnnnnnnnnnnnnnnnnnnnnnnnnnnnnnnnnnnnnnnnnnnnnnnnnnnnnnnnnnnnnnnnnnnnnnnnnnnnnnnnnnnnnnnnnnnnnnnnnnnnnnnnnnnnnnnnnnnnnnnnnnnnnnnnnnnnnnnnnnnnnnnnnnnnnnnnnnnnnnnnnnnnnnnnnnnnnnnnnnnnnnnnnnnnnnnnnnnnnnnnnnnnnnnnnnnnnnnnnnnnnnnnnnnnnnnnnnnnnnnnnnnnnnnnnnnnnnnnnnnnnnnnnnnnnnnnnnnnnnnnnnnnnnnnnnnnnnnnnnnnnnnnnnnnnnnnnnnnnnnnnnnnnnnnnnnnnnnnnnnnnnnnnnnnnnnnnnnnnnnnnnnnnnnnnnnnnnnnnnnnnnnnnnnnnnnnnnnnnnnnnnnnnnnnnnnnnnnnnnnnnnnnnnnnnnnnnnnnnnnnnnnnnnnnnnnnnnnnnnnnnnnnnnnnnnnnnnnnnnnnnnnnnnnnnnnnnnnnnnnnnnnnnnnnnnnnnnnnnnnnnnnnnnnnnnnnnnnnnnnnnnnnnnnnnnnnnnnnnnnnnnnnnnnnnnnnnnnnnnnnnnnnnnnnnnnnnnnnnnnnnnnnnnnnnnnnnnnnnnnnnnnnnnnnnnnnnnnnnnnnnnnnnnnnnnnnnnnnnnnnnnnnnnnnnnnnnnnnnnnnnnnnnnnnnnnnnnnnnnnnnnnnnnnnnnnnnnnnnnnnnnnnnnnnnnnnnnnnnnnnnnnnnnnnnnnnnnnnnnnnnnnnnnnnnnnnnnnnnnnnnnnnnnnnnnnnnnnnnnnnnnnnnnnnnnnnnnnnnnnnnnnnnnnnnnnnnnnnnnnnnnnnnnnnnnnnnnnnnnnnnnnnnnnnnnnnnnnnnnnnnnnnnnnnnnnnnnnnnnnnnnnnnnnnnnnnnnnnnnnnnnnnnnnnnnnnnnnnnnnnnnnnnnnnnnnnnnnnnnnnnnnnnnnnnnnnnnnnnnnnnnnnnnnnnnnnnnnnnnnnnnnnnnnnnnnnnnnnnnnnnnnnnnnnnnnnnnnnnnnnnnnnnnnnnnnnnnnnnnnnnnnnnnnnnnnnnnnnnnnnnnnnnnnnnnnnnnnnnnnnnnnnnnnnnnnnnnnnnnnnnnnnnnnnnnnnnnnnnnnnnnnnnnnnnnnnnnnnnnnnnnnnnnnnnnnnnnnnnnnnnnnnnnnnnnnnnnnnnnnnnnnnnnnnnnnnnnnnnnnnnnnnnnnnnnnnnnnnnnnnnnnnnnnnnnnnnnnnnnnnnnnnnnnnnnnnnnnnnnnnnnnnnnnnnnnnnnnnnnnnnnnnnnnnnnnnnnnnnnnnnnnnnnnnnnnnnnnnnnnnnnnnnnnnnnnnnnnnnnnnnnnnnnnnnnnnnnnnnnnnnnnnnnnnnnnnnnnnnnnnnnnnnnnnnnnnnnnnnnnnnnnnnnnnnnnnnnnnnnnnnnnnnnnnnnnnnnnnnnnnnnnnnnnnnnnnnnnnnnnnnnnnnnnnnnnnnnnnnnnnnnnnnnnnnnnnnnnnnnnnnnnnnnnnnnnnnnnnnnnnnnnnnnnnnnnnnnnnnnnnnnnnnnnnnnnnnnnnnnnnnnnnnnnnnnnnnnnnnnnnnnnnnnnnnnnnnnnnnnnnnnnnnnnnnnnnnnnnnnnnnnnnnnnnnnnnnnnnnnnnnnnnnnnnnnnnnnnnnnnnnnnnnnnnnnnnnnnnnnnnnnnnnnnnnnnnnnnnnnnnnnnnnnnnnnnnnnnnnnnnnnnnnnnnnnnnnnnnnnnnnnnnnnnnnnnnnnnnnnnnnnnnnnnnnnnnnnnnnnnnnnnnnnnnnnnnnnnnnnnnnnnnnnnnnnnnnnnnnnnnnnnnnnnnnnnnnnnnnnnnnnnnnnnnnnnnnnnnnnnnnnnnnnnnnnnnnnnnnnnnnnnnnnnnnnnnnnnnnnnnnnnnnnnnnnnnnnnnnnnnnnnnnnnnnnnnnnnnnnnnnnnnnnnnnnnnnnnnnnnnnnnnnnnnnnnnnnnnnnnnnnnnnnnnnnnnnnnnnnnnnnnnnnnnnnnnnnnnnnnnnnnnnnnnnnnnnnnnnnnnnnnnnnnnnnnnnnnnnnnnnnnnnnnnnnnnnnnnnnnnnnnnnnnnnnnnnnnnnnnnnnnnnnnnnnnnnnnnnnnnnnnnnnnnnnnnnnnnnnnnnnnnnnnnnnnnnnnnnnnnnnnnnnnnnnnnnnnnnnnnnnnnnnnnnnnnnnnnnnnnnnnnnnnnnnnnnnnnnnnnnnnnnnnnnnnnnnnnnnnnnnnnnnnnnnnnnnnnnnnnnnnnnnnnnnnnnnnnnnnnnnnnnnnnnnnnnnnnnnnnnnnnnnnnnnnnnnnnnnnnnnnnnnnnnnnnnnnnnnnnnnnnnnnnnnnnnnnnnnnnnnnnnnnnnnnnnnnnnnnnnnnnnnnnnnnnnnnnnnnnnnnnnnnnnnnnnnnnnnnnnnnnnnnnnnnnnnnnnnnnnnnnnnnnnnnnnnnnnnnnnnnnnnnnnnnnnnnnnnnnnnnnnnnnnnnnnnnnnnnnnnnnnnnnnnnnnnnnnnnnnnnnnnnnnnnnnnnnnnnnnnnnnnnnnnnnnnnnnnnnnnnnnnnnnnnnnnnnnnnnnnnnnnnnnnnnnnnnnnnnnnnnnnnnnnnnnnnnnnnnnnnnnnnnnnnnnnnnnnnnnnnnnnnnnnnnnnnnnnnnnnnnnnnnnnnnnnnnnnnnnnnnnnnnnnnnnnnnnnnnnnnnnnnnnnnnnnnnnnnnnnnnnnnnnnnnnnnnnnnnnnnnnnnnnnnnnnnnnnnnnnnnnnnnnnnnnnnnnnnnnnnnnnnnnnnnnnnnnnnnnnnnnnnnnnnnnnnnnnnnnnnnnnnnnnnnnnnnnnnnnnnnnnnnnnnnnnnnnnnnnnnnnnnnnnnnnnnnnnnnnnnnnnnnnnnnnnnnnnnnnnnnnnnnnnnnnnnnnnnnnnnnnnnnnnnnnnnnnnnnnnnnnnnnnnnnnnnnnnnnnnnnnnnnnnnnnnnnnnnnnnnnnnnnnnnnnnnnnnnnnnnnnnnnnnnnnnnnnnnnnnnnnnnnnnnnnnnnnnnnnnnnnnnnnnnnnnnnnnnnnnnnnnnnnnnnnnnnnnnnnnnnnnnnnnnnnnnnnnnnnnnnnnnnnnnnnnnnnnnnnnnnnnnnnnnnnnnnnnnnnnnnnnnnnnnnnnnnnnnnnnnnnnnnnnnnnnnnnnnnnnnnnnnnnnnnnnnnnnnnnnnnnnnnnnnnnnnnnnnnnnnnnnnnnnnnnnnnnnnnnnnnnnnnnnnnnnnnnnnnnnnnnnnnnnnnnnnnnnnnnnnnnnnnnnnnnnnnnnnnnnnnnnnnnnnnnnnnnnnnnnnnnnnnnnnnnnnnnnnnnnnnnnnnnnnnnnnnnnnnnnnnnnnnnnnnnnnnnnnnnnnnnnnnnnnnnnnnnnnnnnnnnnnnnnnnnnnnnnnnnnnnnnnnnnnnnnnnnnnnnnnnnnnnnnnnnnnnnnnnnnnnnnnnnnnnnnnnnnnnnnnnnnnnnnnnnnnnnnnnnnnnnnnnnnnnnnnnnnnnnnnnnnnnnnnnnnnnnnnnnnnnnnnnnnnnnnnnnnnnnnnnnnnnnnnnnnnnnnnnnnnnnnnnnnnnnnnnnnnnnnnnnnnnnnnnnnnnnnnnnnnnnnnnnnnnnnnnnnnnnnnnnnnnnnnnnnnnnnnnnnnnnnnnnnnnnnnnnnnnnnnnnnnnnnnnnnnnnnnnnnnnnnnnnnnnnnnnnnnnnnnnnnnnnnnnnnnnnnnnnnnnnnnnnnnnnnnnnnnnnnnnnnnnnnnnnnnnnnnnnnnnnnnnnnnnnnnnnnnnnnnnnnnnnnnnnnnnnnnnnnnnnnnnnnnnnnnnnnnnnnnnnnnnnnnnnnnnnnnnnnnnnnnnnnnnnnnnnnnnnnnnnnnnnnnnnnnnnnnnnnnnnnnnnnnnnnnnnnnnnnnnnnnnnnnnnnnnnnnnnnnnnnnnnnnnnnnnnnnnnnnnnnnnnnnnnnnnnnnnnnnnnnnnnnnnnnnnnnnnnnnnnnnnnnnnnnnnnnnnnnnnnnnnnnnnnnnnnnnnnnnnnnnnnnnnnnnnnnnnnnnnnnnnnnnnnnnnnnnnnnnnnnnnnnnnnnnnnnnnnnnnnnnnnnnnnnnnnnnnnnnnnnnnnnnnnnnnnnnnnnnnnnnnnnnnnnnnnnnnnnnnnnnnnnnnnnnnnnnnnnnnnnnnnnnnnnnnnnnnnnnnnnnnnnnnnnnnnnnnnnnnnnnnnnnnnnnnnnnnnnnnnnnnnnnnnnnnnnnnnnnnnnnnnnnnnnnnnnnnnnnnnnnnnnnnnnnnnnnnnnnnnnnnnnnnnnnnnnnnnnnnnnnnnnnnnnnnnnnnnnnnnnnnnnnnnnnnnnnnnnnnnnnnnnnnnnnnnnnnnnnnnnnnnnnnnnnnnnnnnnnnnnnnnnnnnnnnnnnnnnnnnnnnnnnnnnnnnnnnnnnnnnnnnnnnnnnnnnnnnnnnnnnnnnnnnnnnnnnnnnnnnnnnnnnnnnnnnnnnnnnnnnnnnnnnnnnnnnnnnnnnnnnnnnnnnnnnnnnnnnnnnnnnnnnnnnnnnnnnnnnnnnnnnnnnnnnnnnnnnnnnnnnnnnnnnnnnnnnnnnnnnnnnnnnnnnnnnnnnnnnnnnnnnnnnnnnnnnnnnnnnnnnnnnnnnnnnnnnnnnnnnnnnnnnnnnnnnnnnnnnnnnnnnnnnnnnnnnnnnnnnnnnnnnnnnnnnnnnnnnnnnnnnnnnnnnnnnnnnnnnnnnnnnnnnnnnnnnnnnnnnnnnnnnnnnnnnnnnnnnnnnnnnnnnnnnnnnnnnnnnnnnnnnnnnnnnnnnnnnnnnnnnnnnnnnnnnnnnnnnnnnnnnnnnnnnnnnnnnnnnnnnnnnnnnnnnnnnnnnnnnnnnnnnnnnnnnnnnnnnnnnnnnnnnnnnnnnnnnnnnnnnnnnnnnnnnnnnnnnnnnnnnnnnnnnnnnnnnnnnnnnnnnnnnnnnnnnnnnnnnnnnnnnnnnnnnnnnnnnnnnnnnnnnnnnnnnnnnnnnnnnnnnnnnnnnnnnnnnnnnnnnnnnnnnnnnnnnnnnnnnnnnnnnnnnnnnnnnnnnnnnnnnnnnnnnnnnnnnnnnnnnnnnnnnnnnnnnnnnnnnnnnnnnnnnnnnnnnnnnnnnnnnnnnnnnnnnnnnnnnnnnnnnnnnnnnnnnnnnnnnnnnnnnnnnnnnnnnnnnnnnnnnnnnnnnnnnnnnnnnnnnnnnnnnnnnnnnnnnnnnnnnnnnnnnnnnnnnnnnnnnnnnnnnnnnnnnnnnnnnnnnnnnnnnnnnnnnnnnnnnnnnnnnnnnnnnnnnnnnnnnnnnnnnnnnnnnnnnnnnnnnnnnnnnnnnnnnnnnnnnnnnnnnnnnnnnnnnnnnnnnnnnnnnnnnnnnnnnnnnnnnnnnnnnnnnnnnnnnnnnnnnnnnnnnnnnnnnnnnnnnnnnnnnnnnnnnnnnnnnnnnnnnnnnnnnnnnnnnnnnnnnnnnnnnnnnnnnnnnnnnnnnnnnnnnnnnnnnnnnnnnnnnnnnnnnnnnnnnnnnnnnnnnnnnnnnnnnnnnnnnnnnnnnnnnnnnnnnnnnnnnnnnnnnnnacccgagcccccccccctccccccgcccccccccccccccggtggggaggagcacccaggtagccagcccctaagaaggcggggctacagcttcccctacaggtagaggatggacagtctcagcccagggtatgagcaattttcatcgcttttctatttttgccttcttttgaacatctgtgaaatcctcccttcccagtttcttacctgtcaccaccatcagtctccagctctgcctctctccccagtgtaaacactgcttcagttttctgtcttccctcctctccagctcatatatgttgtagtggcgtccctgccccaggccatggggctagggtggtgtttgggtgtggggcctgggcagcacctaccggttttcttttaaaaataaaatctctctctctctctctctctctctctctctctctctctctctgtgtgtgtctgtgtgtgtgtgtgtatctgtgtgtctgtgtgtgtgtnnnnnnnnnnnnnnnnnnnnnnnnnnnntgcacttgccagactcagtcggtcaggcttggcagcaagcacctctccatttaagtctcctttgctgtctgctttttttcccccataatgtgcccaatattattctaaatgttttacacagattatcttgtttactgttcacacaaccctatggcatcagtatgactgttctgactcctattttacagaaccaaaaggggctatcaggtacaggcacagctctccttttgcctggctggaggagatcctggcacttgtatctaagcaatcttcctcagaccactctatgacgaggcttcgaagaactctgacccttatctttgggtgtaagacttcaaagacttcatacttgtacttctttttaaaatagatttaataaaatttgatagttttagttatgcgtctcaccacagttctgtacctgtccagcattcttttctgccacttttcttctttgctttagactcgtttggaagaatgaactcttggcagaaacatcactttattttattccctcattaactgaacgaaactgcccacttgattctaagaacgctaaagctccactgtgctttgaccttgcattcgaaatatcttagatacatcttagaaatatcttagatacctctttttagtttcccatgtctgtaaaacaagtagagaaaaatatgctctagatttatgccagattcttaggtatctgtgtttccaaggaaaatcttctctttaaaaattcactaggcaaataaaaatttgctatttggagtgtgccatggctctgactggaaagctcaacctcctgagtgaggagactataaagaaaaacccaatcatacccgctccaggatagtttcatcactctttgaaagtatctcacaggctggactggaaactgtgggaggctggggtccccactgtgtagagcatactgtctgtctcattacagcccctctgaatggtgttgctgagtgaatacatcactgtaccccctcagaacctgccgtcagaggctcctggggtatctttcctaagtaatcagcatggactcaagtgctgtgggggatcgatgacagaacacaaataacacatcatcccaaccctccggaagcttccagctctgcagaaggctcaaacccctaactccctagtgcagccctgtgaataatggaggggagtggggaggcaacaggaagggaagactttttatggaggtgggactttgtgggagggagcaccctggagaaaacatttcaaggtagtctgaagaacaagaccaacaaaggagtagaaccacaggtgcaagggccagtccaaagagagtgagagggccggggccttactcagggactagccaagagagggatagagggtctgggtcttactcggggaccagccaagtgaaggcgagagggtcggggctcttttttttttgggggggggttcgagacagggtttcctctgtggctttggaggctgtcctggaactagctcttgtagaccaggatggtctcgaactcacagagatcctcctgcctctgcctcccaagtgctgggattaaaggcatgcaccaccaacgcccggcgagggttggggctcttacttggggaccagtccagagagagcaagaaggttagggacttagccctcctatgtattctcccactggcccctccttgggtgctaaaatcataggttttattgatcctagaaggactggggctagggctagacggggggaggcaaggactggtggaaatttggaggaaggtattttcagcaagcattaatggcagcaaagcctcnnnnnnnnnnnnnnnnnnnnnnnnnnnnnnnngccgacaaagggaaggaatagcttacatattacatcatagtaggtaagcaaaccctgttctagaaggaggcaggatacctgagggccactcagtgcctgtgttcccatgggcttcatggaaaactgaatttagcccaggcaagagcagaggaaggaaggagtgagtctagagagttgcttagacctttagtgctggggcgaggtgcacacatggctgacatcccaaggcatcccaagataccctaaacccacttgatacatatgttggagcgattagcaggacttaacttgctctggtcctcacaggatgtctgccccagaagccccacaggcctcactacaacggttaccttaccctcttgagacagggagcagggtatgatgcttcctctaccacttcagttccaggatttccacagatatcaaatccactgttttcttttgatgctgtttctgctatgccgcaaaatttgcccattagttttgttcccccactactttattctttttctgtggggagggaggtcacaatttacagacaaacagcaagaacaagacggatagcagcaacaaagccaggcatgaggaaacaggaggcgcagagatgggaggggctcttcagtgtgagaaagcacagcggggtactgatgcttgctgaaaatctccccggagtctccggtagtgtcaatacaattctgggaactcggaaactggttctcacagaaatcattattggtagggatggcagtttccaagtgtggcgttttcagagtcatctgctttagagccttctgaagcactcccagcgtctcagtcacctccccacactgctgcagagactgcgggactgcctctggaggtaattacttcagactgagcttcacgctaatggtgctacctcattagcaacacggcttggagcgagcgggcggctactttcaatgggttttgaatggagatgaaattaaagtggaattgttgggtagagaactgttttacgaatgtcctcacacaaagggaacagtaaggatgttgtgccccctcccatcttgtcttctctaagcctggctttctcttattacagggccagggtaagtttcagcccctctctgtggttgggttcctccctaactccagatgtgcctgtctctagctgttggcggtgttttggtcataattctgttttgtatttcaagttacaattctgttttgcacagttaagccacacacaaacagccttaatggaaaagtttgatttctaggatgtagggggagaggatgtaagtgtgtgtgtgtgtgtgtgtgtgtgtgtgtgtgtgtgtgagagagagagagagagagagagagagagagagagagagagagaggtctagtttccatcaacaattggccttttgagggattattgtacagtgtattatgatgtgaattcaccagactttccaggatcccagccacaaatgggatccttgtaaatatcatgttaacaagagaatatctaaaaaggtgtggaagacatacgcttgctcactcatacatgagcaaactttgtatgctgctggaaggcttgaggccacaggattgaaaaatgccatgaaggaatgctgtgtatgggtgatccctacccgtgcagatgtagggagacagaaaacatgttagaaccagattgcaaggattgccatgggagctgttgatatttactatggattctctggatgagtattgttatccaagaaactaatgagaatgatatatggtcctggaagacctttctggaagcatgattggagacaatagtgtgtctagaaatgtagcagggcaaattaggacttaagacagtaaatgagagccctttgagacagggacaggccccactgatttgagagcaggggctatttctggctgaatagcataccagtttaaattttctttctctctcatttgccctgaagttgaattaaaacaaccaaggacatgttggcttttgaagataaattaaccttgaaactaagattttgattgaaatttcatttttttaagattagatttgtctcatttgttcaattaaacatgaggcctctacaaatgaagtttgaagacgttcattggaaacattttatgctttaatagagccttttcctcccattcgagattttgcttattaataagattcatagaaattcaataaaagtttctttcatcattactctgtactctctcaagagttgaaatacccatttaaaaataaaagatgagtaaaaagcaactcaggaactcaaatgaaagcaataaaatcttgtaaggatgtgtatcgggaagtttcatgtgagcagagattcattagtgaacagaggagagaaattcatggactttggtctgcagctgtgacctgacttttgaatttgttagaatggttccttagtccacaaccagttcctccatcttctactacctgtgtttagaacaaatagacgctttctaggttgagcattgtggggaggaggggtcatagttaaagaatccatttgtctacacaagtgcaggcttcatgggagaactataatgttgtctatcaaaaagtaaagacttgattttctgtatttgatccactaaggctgcaggggttttctgaaaggaatgttcctggatgtgtttgtagtgagatattatttatgatttattaaagtttgaggattcagaaagcagagtcagccacaagccatagaaaccaggcacacacctttactcccagcagccagaagctagaaggtggtggtacacacctttgatcctaggactcaggattaagaggtagactgatctctgtgagttcaaggccacccagatctagacaaaattgaatcagtctaaaagagaattatagctcacacttttaatcccaggactcattggaggtatattgaaagatccccagaaggctcagtcccccaggatctcggtccaggaacgcagccacctcaatcaccatgcagaggtggaaacttgatgcaaacagcaagaggctttattgtagttgtttaacgagctaaccccatgttagctcaggcctttcatctacccaccatggcggatggctagaaagatggctcgaagcgtctgcatagagatcttatagggcagcgtaaggggagtgtctaggggtatgcacaggctcaggattggtgtgcctccaggctttgagggtttgccctgtgttgattggccaactggttgttatgtcccataggccctcccagggtggttgctatgctctgtgcgtcattgctgtgcacttgtccttaaagcacacccagagccataaagcatagcgccaccagctaactcaaactggggagctggtcttttcaatataagacaggaaggagcaagagtcagaaccaggcaatcagtctccagccactctgaggagagcttgagggtcagccctttcagcctgaaagggtaagaattagtggctggcttctttgattttctgaccttcagcttgaagtttgaaccccagtatctgtctctgggtcttttattaatttgtgttacacctgttgttcagtgctgaagagtacagggttggttcacgcttgaaattttaaccctctgcttccctagatgtttggctgtgcaaatcctcaggctctgagcatccatgaagagatgctcatccctacagtctgggaagactgtgagatgcagtctttgcctggatgctgttaacactgtttcagtgtcttgagtccagaatgcctgtgtggaagtgtaagtttttttttttctttttcttttggagggggtatggttaaccaaatgacataacaaatataaaaagaaagtattttcctggttttttttttttttttttttttggtttttcgagacagggtttctctgtgtagctttggagcctatcctggcacttgctctggagaccagggtgggctcgaactcacagagatctgcctgccgagtgctggtattaaagatatgcgccaccaagcctggctcttttctggtttttgtaaggagtaaatcattagtgtttatgtatgagtgctggggccctggcttgtatcagtcccatgctacagatgtaatctatatgggactgatgtcttcggggctgccatcggagccagccaaatggctatgggtccatccctgagtgggggagtgatggacagggaaactcttagctacctaatggtgataaattccagacacaggcatcttgtcatttcaggagagctcttagtcaatgctggaaaaccagagactctggtttattcaagcatcctcctaaatagcttttcaacgggggtgggggggctgaccgcagaagacatctactatcatatattgaagggacccgctccccatttcggcagccttgacagtaacacatgcttgccaaaaccttgccttggtcacttagaggtcagacgcctgcctcgtgacaaggaaccaatcagaagttagctggtggcgctatgctttacgaccctgggtgtactttacggacaagcacacagcattgacgcagaggagagcaaccaccctgggagggcctataggccataacaaccaattggccaaccaacacagggcaagccctccaagcctggaggcacaccaatcctgagaatgtgcatatccctagacactccccttacgatgccctataaagatctatatgcagtgggttcgaggtgtcttttgcgagccatccgccatggtgggtgggtaaaagatctgagctaacatggggttagctcgttaaattacaataaagcctcatgcactttgcagcaaggtgtcgaatctgcctggtgattggggtgaccgcggtcgtggcctgggaccccggatacccgagttttttgggggtctaacaatataaagctatataaaaaaattgttttagctttagcagcacacctaaacagtccctaggtgcataaataaggcctcagaacaggtgcaggcacaaggggcctaggtctgttgttatgcaaactagtggactttctcccttgaggccaagccatcaagcgataatttagccagcatctgaaagacaatgagagattctggctcctggaaatggagtggaagtttggaccccaaaactttataatccatttttgggccccgaaatattaggtatgttcagagctcatctatgaatcacaggtatgcaggacacactagaaacattgttgccaaagctctctaatcccccctcccccattcaaatatatgagaccaatagggttgtgactcacaacttaagaagctgatgtcaccctattataaatactggctggcttgttttgaggcagagagatggctcaaaacacactgctcttgtagaggacctaagtttggttcctagcacccacattaggtggctcacaaccctctgtaactccaagtccagaggttctgaaccctctcatggactctgtgggtgctgcccctgcaaacatccacactcagacacaaatatttaaaaataaaaataagtaagaatgtattgggggaattcaaaagacctcaaataacaaacaacaaaaaattaaagagaagaaaaagctggtacctgtgttttgtgtctgttagacccccgaaaactcaagtatccggggtctcaggccaggttcgcggtcaccccaatcaccaggcagattcgagagcttgctgcaaactgcannnnnnnnnnnnnnnnnnnnnnnnnnnnnnnnnnnnnnnnnnnnnnnnnaggcttacgcacaggctcatgattggtgtgcctccaggcttggagggcttgccctgtgttgattggtcaactggttgttatggctcataggccctcccagggtggttgctatgctttttacgtcattgtcgtgcgcttgtccataaagcacacccagagccataaagcatagcgccaccagctaacttctgattggttccttgtcacaagacaggcatctgatctctacgtgaccaaggcaggtttatggcaagcatgtgtttggctgttatggctgccaaaagggaaacccgttccttcatgtcgtttcaaaggtgactacacaatgactaatgggaagttgctatggtccattgcagatctatagcacacagtggtagatataatttgacaattggtatacaaagtgaagtcatgagaccagtgtagatttgacaatggatcattcggtgagaattggataccttttgagagagagaaaatagttctcaatcccttccttcataccctattcagaaattaatccccaaatggatagacatcctgatcatgtctgggtaagaaagattgctatacaaattagtacatgtaaaaaaacccaaccaaccaaccaaacaaacaaacaaattagtatatgcacttgcacataggtgtgttcacacacaggcacacacacaggcacacacacacacacacacacacacacaagccttgccatgaggccatgctcagcaagaaaaagctgcaaatgatagacatacaacagcattgatgaagatgaaaaatggtgcagagcaaaaaaagccaaagcccaaacatgtactgcatggaattctacaacattgagacaatgtatagtgactaaaagaagcagtttcctcagactacttnnnnnnnnnnnnnnnataaaggacatgagggagcttctgaaagtgatgaaaatgcattgactcctaagatgtatttgaacacttacaatgtatgcattttattaagtgtgactctcactcataaaaacaattccaagccaggtattggtgacatcaacctttaatcccagtgcttaggaggcagaggcagatggatctctgtgagttcaagaccagcctggtttacaagagctagttccaggacaggtttcaaagctacacagagaaaccctgtctcaaaagacaacaataacaacaacaaaaaaattccaagagcaaaaaccattacatacgcacatattttatagttttattttatctctttaaatagatagaactaaagcttataggtagccctgtgccctatataattatagtgtaataggataattttccagtcagcattgtatgctgtagctgaattcaatttctaaagtgtggacctccagggctggagatgcagctctgtagtgcagcttgccaagctcatactagccttgaagtccatttcacccttccaaagaaacgtggctgtcagtatctggtggtattgcacagtgcagagtaagacttttgagatctattagactgtacacacttgtttattctgaacagctgtagaagttattaaacacatctcctcttttctttctctgcttgtaactttaatagaatgtaagtgtaaaaaatgttatgttggttgatttcaatctgatgaaagaattcgattgctataaagggcagatgagaaaacgttagttctattttcagaatgaacgagctgaaaccagttaatgtttattttccacgggagaaatgcttgcttttgattaaacttctttatacacagtggctgagtgatggattccaggatgtgttctgggagagatggagcatggcttgctttctttgagtctttgtttaagttctcatcggcttattatttcgtgtgcactgactcattggaagaccatgtttttaaacttctagaatgtgggatggaaatgtttcagaagagtttgatttaggtctgatttcaaactttatatatattttagacagggtcttgctacgtagctcaggctagccttgaactcatggtggttctcctgcttcagcctcccctatactgggatgagagtacatgctgcctgtccttgccgtatctttagaccattagtaacagtaagaccttgttattagatctttagaagacagtgtgtagatggttcttttcttccataaatcttagtgttgaattaaatgctgaacttgttacttgttgtgtgcagattcttgagatgcatttgttttggctcacagtttgaaggtgtcttcatggcagcaggatagtgaggcagcatggtcgtgtcacatccatagtaggaagcagagagtgacgactgctgctgctctgcttgttttctccttattcagtgtctgtcagcccccccccccatccccccatgactcaagaagcccaggcagtggacattttctggagcttgcttggctcaaggttaaagaacacatgtctgaaaagttaaggtggtaaatgggaacctttccaggcatgttcaatttcttccttgaaaacttttgttgaaacacaaggaaggggaaatttgaaggtgtattcatataaaggcttgctcctaaggacacccacttctcctatctgctaaccattccagcctccagaggaaaaaaaatcacagaaaggaagtgtagggagagatcctggatacctgtaccactgaccaggcccaaacgggtgtggttgcaggtacttagagggatagaataaagagagaggacaggaggtgctcctcctctcttggggtacaagccagggggtggtggctcatggcacgcctttaatcgagcactccggaggtagaggcaggcggatctttgtgagttcgagaccaccctggtctacaagagctagttccaggacagcctccaaagccacagagaaaccctgggcgtggtcagtggtacaggtatccagagtctctcccgacaatgaagggccatccctgctcttctacacattcttctgtgtaaaattctccgtttgaggggacagggttgtcaggaatagaatgttattgatttttctgccttgggaccctggtgaaattggcttaaggcttcagcgaggcccctactttccacttgcctattagaagcatacaactgggagaaacagaaagagtaagcagagtgtgggctcaggaccagactgccctgtttccttctcagccctgctagttattgcactcacaaacccggggacgttggttgactgtgtgtgcctgtgtctttcatctttaaatctcggtttaccattgaccaaggagcacttagctttctatggtggctgtaaagagcagcagggttactgcatgtgtttcgctcatgaggcctcagtgtgtattcactacttctgggctattgttttgtaagtacccatagtgtgcatctttcaagcactcctggggtgtcttcttcagagtctgccacaggactgggtgcagggccattgcccaatgtttacctttcaggtggagcactgacatagaattgttcatgatagcagtgaaatcagagccacccttttgtttctttccagttgagtggtaattccccactatcctgagttgttctagcatattgtcagtagattcttatttctgagagaagtgttggaatctcaggcatattcctgctagggcgaagtctgagattttgttggccctcacaagaggggcagcagggcatctttgagtgagaattctgggttgagggtgacctattgaaatctgactctcctacacagcttctagctgtacaaccctgagcaagttactaccatttagtgccccaggttagcctctataatgtctcaataataacagcatgtgtgtcgtgaagttttactgaggatttattgtagatggggtttctgtcctgcctggtcctgctgcccttcagtcccaaataaacatatagatgcttatattagctataaactgtttggccagtagctcaggcttcttattggctggcactctcttaactattaacccatttctattaatctaagtatttccacgtggttttggcttactggagaatgttccagcatgttattccttcggctgttacatggcgtctcccttgccactcactctctgcatcctctcctcagacttctcctcgtctgttagccctgcctaaatttcctgcctgtctattggccaatcagtgttttattcatcaacaaataagagaaccaaatatacagaaggataccacccatcaatttatatatcaatataagtagatcaattagggaatgcccctgctcaacatcaatgtttattgttatttgttattgctgtcatggtgtcactaggatcttgctctggactcccttcacttctccagtcctgtggcctctgttgaaaaacccacacaatgtacacagagtatagtgtgggttataggttgggtttattacagagtgaagtagaaagctctcaagggatgagagtcaacaatggccacagggattgctggagattgaagtactctgaagggccagagagtggacaatgaccagagggcccattgtcctgatctgaagttttgacagacttgatctccaaagtctgtataacaggcagcattttcctaagtaggtaattgacaggtccattggaattgagtcttacaaaggcttccatgtagacagcgatcttttaaggcttagatatttatctgttcattaccttctgatgtttaagatgtcatttctctaaccacggccagagataaggctctaattccattctatgcatcagtcattaaagcaccagagtttcagtgctggccatgcaagctgctgattatgagggagaagtacattcccagggtcttctaagcctggtaatgtcttactagctacttactaattatatggtagtataacctccatttttcaagatagtctcagtgtcaaatattctgcctcacagcattattagactattatttatttgatcctcatgccaattaggaactcataaaacatgactacaaaaaccttggctgtttttaaactttgtactaagtttacatacacactgttatttgcatggattccttagaatttagaagatggaaatagaagtttaggaagatggaaataaaggagaaaatgtaaggaatattgttattgcagagaccaaatcctggttcctcattttctgcctatggcgacctcacttccccatccttctctgggcttgcaggctcatccccttcaggaatgtgaatgagtcatactctcactgtaatacatcggtagtctgtcactgaaggttaaaaagcactgagaggatgcctggcttccagctcatattgctccaacgtctgacattctgctttcctcatccctatccaccaccaaggagatttcacttcttgcctctaggtctcctcaataattctaaaagttccccatctgctactcagatgttctcccaaaagtccttcatccattgcttgtcctggctcctgtaactgatgctgtcacctagttggtggagttatccctatacatcttactctgcattgtgggggtgctcctaccatggccctggaatggtaccttataaatgttacgtgctggggacgctgttctgctaggaatccgatcctgctgcctgcctgcctcaacaccctttcttggctccctatcatcttcaaaaggaaagtcagtctcccaacctgtcttccttaggatcaccattgctgtgatgaaacaccatgaccaaagcaacttgaggaggaaaagatttgttttgctcacagttccataccacagttcatcattaaaagcagtggtggtaggaactcatgcagggcaggaacctggaggcaggagctggtacggaggccatggagcatgtgcacgggggtgggtggtaggtggtggtagaggatgctgcttactgacttgctcctcacggctctgctcaacctgctttcttatagaatccaggaccactatccctggggttgcaccacctaccatgggctgggcctttccccatcaattactaattaagaaaaatgccttagttgaagtttctcagttgaagttccctccatttagatcattctagcttgcatcaagttgacatagaactagtcaggacacctgctttttcatgttttcccatgcggtgccagcttgggtctcccatctcgagcctcatttctttaatatcggacctcagtccctctcttctctctgagttgttttcaggttgccttgtgggccctttatctatcgtcctctgtgtctaagctccagggtctgcctgtcttcctgttcacacatccgaaccccatctttctgtccgggtcttctttgttcaggatctgagcttgctctttgcttaccttactcctgatgctcaactctgacctgcagcgtgaagcaatagtcagcagctgcagctgcccagccaatgtctctagctgcttctttatcttcctcccacaagctctttacttttgtcagcctcccagctgtggcttctcaggcctctttgaaaccactagctgctttagtcatatttgtagccatcttgcagcctacatgtatacccaggtatagatgatacagccatatagatatttactgtgtgatgtgtaattcgtagtttgagattggaaacgaagggcaggagagatgacccagccattacaaggtctggctgcctttctagaagacctgggttcaattccaagctcccacatggtggctcacaaacccctgacctgtaactccggttctgggggatctgatgccctcttctggtgctcaggcacacatgcaaggctgacaaacaaacacaacacataaaataaaactcactttctctggcaggatgctcacaccccttagttggagtgaatttcttctttgcctggacttttcacaccatttgccatctgttatctcttcctgtatggctggcactatgtctctgaatgtgtgtatacatggagtcctttctctgcatttgtttgtttgttcatcactacttttgggttttgaagacagagtctcatgtagtctggaatgactttgaactcctgttttccctcacatgtgccagggttacaggcctttccacctcatccggctgctgtatggcggaacctggggcttccagcacaacagatgagccacacccccagcacagaaactggagttttagcatgctgggacacagcttgtatcagtcccactctacagaggctatctatatgggactgatgtctcttgggctgagatcagagccagccacatggccctgcgtccatccctgagttggggagtgctggacagggaaactcctagctacccaacagcaataaagaccagacacaggtatcttgtcatttttgggagggctctcagtccatgctggaaaactggagtttctggtttattcaagcatcctcctgaatagctttccaacagtgggggtggcctcagaaggcatctactgtcacgtatatagttgatagcaagtaattcttttaattcaagagtcacctaaatagtccctaggcatgtagacaaaaccctcaggacaggtgcgagcacacccagggcataggtctgttgttatgcaagctaggagacattctccactgaggccaagccatctgggggtaatttagctggtatctaaaagacaatgggagattcaggctcctggaaagtggagtggaggtttggaccccaatactttataattgataatttttgggccctgacattagcacagtggatattttgctcaggtgactggaagtacatagggcagggcctggtgtgagagctcttgatcttaacttccccctggtgtcttacatatacctttggtacaatcagccccttagtactgaaaatgcatttattcttctctttcaaatgtcttgagcctccaaaagaccaaaatggtgttttgattcatttgacccagaaggtgagtagtgtgtgtctgacgcactgtaagataagcagttaagcatttactaaaatgaatttgtaatagcttcatttctgcccccaatgtaacattttctttccacccctgctatctctctcatcctctatctttcttttcttaccacccaggaataaatcagggagaagggctataatgtccacagtgagagagagcaagagggcagagaaaactgtggaaggaattatttctctacattttttaaaccacaggcactggcatatgcttggtcaatgctttcacactgagctgtagcaatagcctgatttcctccaccttaattcctggctttttgaacaaaaacattccattagagtcttgagttcttcattgactaaataaatacttgatcatttttgcttaaatgttgattctggaaactcatactttggtgtgttgtgcccaaactctgaatccccaaatcaccaagagacccaatccgatgcaaaagcaaagagtctttaattttacaagttaacttgggtgttacccccttccccctccatctgacacagcaggtgaagcaggcagggacctcaagcagtagtgggcagggaatatactggggtagagcaaggggagtgtctgggaggtctgctagttgcatagcaacagcctcaggattggtgcacctatgggcttgggcaacctgtccagtattgattggtcagctgcagctacaataaggttgctatgctctgcattccaccattatcagtaaagcacatctatagcccaacaactaacttctgattggttccttgcctcatggagggtatctggcttcctagtgtttagagcaaggtcaggcaaggtcagaggctcagcacatgttgctgagtcagaggcctacatcttgctgggtattttctgcagcctgtcatggctgccaaaacagggggctgagtgaatacccatacattcacagaatgcccatatattgcaaagagctttataaaaagttttcctaaagcattaataataacaacagttttccttattcttttagtcaggaaagagaatacgaaatcatgtactctaacaaaaaaagaatttgaattcatagttacttaaataaaaataaaaaacaaaagtcctgaaattctttttccttttgaagagtaggaaaaaacaaagaaacaaacaaacaaaaaaaatccaaaacaaaaacccaataagaaccaaaacaaaaaccaaacctctcctctactggctgaagaagcagagacacagcccacgtcatgacagattacagcttaatggtacaaagaggttttgggtctgggtcccctggatggaagaaagaaacatgctatggaaaacttactcctacagaagagcccgacagcccttgacagctgtgtttctttgatattcaaaggcagtttctgaagtttctaaccagagaaggcaccacagagatctctccacccaggctctgactagccttcaatctcttgtttcacagccagctcttatcccagcatgatacttacaaagaaagttttgtgcaggagaatgtgtctcctgttatcacagcagggatgtgtgaggcacctgggaatagcagcagtttcgttctggaagccagtttgaaagtcacagaaggaatggcagccagactccgggtgtatctgttataattagcagaaacacaagcattcttgcagctttatgtatgagaaaatgaggccagagatacttaactgacttacataaagtcacacgtggtcatttatgtcaaagtgtcaacaataaaatccagattaggctctttctggtgaattcagaagtttcccagtctaccatactagtaatttagtcagagaaacctgattattaatctctgcatcctctaaacttaataggtttagccagggttgttgccatgggtctcctcgttattaacaatgtcaaggaagttgtaacttaagagcaagccctggcatgtagtgagtttcagtttttatgtggatcatattttacctcatctaatctagttcctgtagcagcccttagcagggtgcttgtacctcatctctgccctaagtcctgcctaacctctcctgcctagctattggccattcaactctttattaagccaatcagaaggtgccttagacaggcaaggaagaacagcaacacatcttcacactgtgtgaccaaatatcccacaacagctttccacactcctttaagatacctgtactagaatttgttatcttgactgtccataaagttatctttaatttattccctaggtaggagttgtgctttgcttgattatatgtcctctggtgcatgctagtctattattccttgtttcttcacccctccctggtagatttttctctttgtcaccagctctgtgctttagctctgtcttccttgttttgccatcataggctcctcgttttagaagtcagttttgtttctctggtgcttgagttcttttgaagggtttataaattctgtgccccattttgttttgtgttttcattgacatgatgtaattgcacatatgtatgggtgcagtgtgatgttctaatacatgtaaacattatgcagcagtcagatcagggtaactgacatatccatcacctcaaatgtcagtcatttctttgtgttgggaataatgaaagtcatctctactagctatttttagatacatagttaatggttgtcagttatagctactggagactttagaagttattattcttttcgagtgtcctcctaaacccgataaccatgccctagcaccaactactgctttacacttccaagagagcatcttcccctatgtacaagtgagagcccattgcagtattgtctttttgtgcttgacttcttcatcaaacacagcgtcttctagttccacccatgtcactacaaatggcagtgctccaatctttcatggctaaattttatatttacatatatatatattaggaatgtattatatgtaaattatatatttttgtttttataaatttaaattaggaacaatcttattttacatatcaaacccagttccctctccctcccattctcccatgcccccaccacccccatcccattcctcttctgctaaattgaaaggatgaagccttctatgggggatcatcagagtctgtcacgtcatttggggcagggccaagggcctcccccgtgtgtctaggctgagagagtataattttctttaaaattttttattccattttatgcatatggatgttttgcctgcacctatgtctgtgtagcacatgccctcagtggccagaagatgtcagatcccctggaactggagctacagatggttgtaagctgccatgtgggtgctaggaatcaaacaaacgtcctcagaagagcagccagtgctcttaactgccaagccatctcccacccaacatatcataattttaaaagactctttcaacagtcaccgtggctgatgccatgttttggctgttgactacttatttccttgcttttgaatataaatctttttgcctctggcttgtaagaggatgctgcacaaaccagaagcacataccctgcctagaaagagctgcagcacagccaaccttgggtggcttttaaaacttgacttctcagttctgatcacgagggagccattagtagctgggggtagttacctggggtgcgccctcggtcagaatcatttagtctctcacattctctattttatctcgagtagtcagtatttccatggccgatcaataactttttcaacctggagtgagtagaatgtgctaatcaatggaatggcatgacataggattgtaaatgtgtctgctttcaagctgcgtagaaagctgtaattaaaagttaaaggatagaggagtcattgtgctttgattagagtgaggaaaaatgaaaggcggcttatgaactggaagcctgtgaaggcacaaacttccacctgcagacacccccggggctcagtgggtgtcatggttagcttctgctgtcaacttgacacaaagctagagtcatctggttagagggaaccttgactgaaaacttgcctcagtcagattggcctatggccatgtctgtgagacatttttaaaaatcattaattcatgttagagggtccaggtctctgttggtgataccattcctaggcaagtgggcctgggttgtataaaaaaaagcaacctgaacaagccagtaggcagcatttctccatggtttctactcctagttcttgcctggactttacttcatgatagattattgactgggaagcataagatgaaataaaaccctcttttcccccaagttgcttttggtagtggtctttataacagaaagtaaactagaacaactggcatatgacgtgtccaggcttgaatagttggcagtcatgctactacattgtctccttcatttgtccctggtcaagcttgcagttctaacattaaggttggatgactgcttttggcaaggcaccgttgtgatcttggaccggacctcactgatccggtctctaatcttgacacctcccttgctcctccttttaataataggggccgtccatcctaaatgcccccagttccctaccaagctcagtttgtcccaaggcattttcaggtgtttcttccactttacctcttccttcgtgacagctgtttctccgttactcctagggcttcttgcctgaaagtcttagttgtgccagatgctctggaaacctggattttcttctgtctcattgccctggatgttatttgtctgccagtcacttactcccccttgccatgagggcttgaggtctgcgtcattcctccgtctgtgtccctagcggaggaagacccgcggcaagtgcgtatcaaatgaatgatttcacgtgtgtaaaatccggacattttcccacttcagtgtcccacacccctatccttccttcacccagctggaaaatcccgatcaatgtaattggccttttacctcttgaagaaaatggcatgattccatatattatgtttctattaaaatcttcaattgcaaaaaaaaaaaaaaaaaaaaaaaattgataaaagcaaagggaacaatccttttcttgcaaaggcttggaacataatggcaaaaatcatttttataatgactaaagtgccaggctctagtgaacaccatgcaaagcctttaatttaaaattttgttccttgctgactgtgtttctaacacaaatgctctgtgatgtgatcatctggtggcattactatcaggggtcccagactctgtaaacatctgtccactcacttcagtcacgtggaggctcagagtcacctgaggcgaaccaacaatccagtctagagaggggcttcctggagtcaataccaagctcagcacatttttgtgtctatccccttatggtcaccgagccgaaatgatgctagggagggcagtggattgggacacagatgtcagagcctcacagatgcctgcatgtgctaggcgtgacctcttaggctgtctcccaccctatggaactgatgaagttttgtcggtgtctgactcgtctcatctgaaattcctgaagtggttagagtgctcattagaagacagacttcttgtctcaaagtctggaagcctgtgcctgatacaaagtataatcaatgtgtgattgtttgcaaaaactgggaggaaggttagagaaaggaacagtattggtttaaagtccaagtgtagcacagagcttggtaataggtaagaaatgattttttttaaacaagtgctcatcatgtttcctccctgcttagatgtctagaaacttactgttgtatcttatgactctatatttgatcctaaggtactaactactgatgctgatgcattttaaatttactatatatttatctggggtaagaaaagtcatcctttaagccatattaatattcagtgtaacttcttttatacatttgcacttctgtggcttgcagaagggactgcattctcacgagctgatctcactgggtgctaaggagttaccttaagggtgtagtcccagctaagtaccagacgactggaatgtgcaggcacagaaaggtgaaaattcttacaccagcaagaagcacaggtgtgaattatttccatggtttaaagtgtttaatataaggctggttattaaaaccccttggattcgagttcatttatttaaagaactgggtgcagggaaatgattgtacagaagcctgggcttgctgggtggtggtggcgcacgcctttaatcccagcactcgggaggctgaggcaggcagatctctgtgagttcgaggttagcctggtctccagagcgagtgccaggataggctccaagctacacagagaaaccctgtctcgaaaaaccaaataaataaataaataaataaataaataaataaataaataagcctgggctctgcctctggccgctcctgttttagtgagaggacagagcaggcacagggagttgtgctaaagccttggtgctgtggtcttccagcctggcctggggagagggtgggacaagggaggcttattagaggaagtgacatttacacaggacatgaaggatgggaggagttggagttactgacctgtggaagttgattctaggagatggagttagccaggtgctactcttggggatggaagacctaaaggatgaggcaactggatgtgacgtgaccaatgtgtaagacaagggcaaaggagaggctggcagcagttcagagacagtgctccagtgtcaactggaacaagtgacagagagaagctgaagtaggtgggtgtaaaggaggcctgtggcccaggcacgggctgtcttcatctccagcaggtggtggtcacacagtctcattcctgagatgcttggtgttactactatttcatggcctttgtgtctgtgaactctgtatcctcaaaccaacctaatctttgcttgaattagactgaatgagtttccattgccttctgagtcagagatcttggattttccaggcactggagcagtgttctccttttcttgatggtgacttctattctgttccttagttcctaagacttttctgtgccttcttcagggatagattatgtacaagcaacaccttttgtcctttcagttgatttctttatgtattcaaatgggcctcagtcagctcaaccttgggtttgttctactttccttaacaaggatttattatttctttttcttccagcactttccaggcatcaaggtctgaacccttgattttgatgcctgccaagccattgttgggatcttctgtgactccacatgaatttggtttagcttttgtcagtggataatgctggtgttctatagctgcatcatcatttggcccttgtgaagttactgggagacagaatctgagtaatgaacactatttccttggatatcagtttgctgaagccattagagtaaatgcccccatgtacgtagtgtgctactttgtgttgtgttgtttccttctgagtgtaaaattgaacaaaggtgatagacactggcctcttcaccatgtatgctggtgtctgtgtgactcatggttgttatgggtagaggtcatgctagtcagcacaaggacaccagagtgaggctgatagaaactcccagaggatcaagagtgagactgaatcctgttgctcgaagaagggttctacccagatgaagttcagatgtcatgttctatgtttgccagagcttagatcccagagctgatacctagccaagatgtgaccctggcctgttttccttctaaagtgactcaaactcccaagctaatcaggaaaaaacccacttctataagtttacctgaagttcaagagttggacactatgctgggtctcaccctgtcactatctggagaaatattcctagcatgacatcatgagcagcaagcttccttttccgtgaccccaaattcagcctgccaacaagcaagctcactgtcttcccaagaatttgaattcccttttcatgagctatgttctgtcaatgtctcaccagtttctagtcctgtaagtgagaaacaggttgtttctgacaagctctttctttgttgtctgttagttcagaacctggtttttgatttgtttctttgaagttatctttctgcttcctttctttctgttgccatggtctctcccagcaccagaagaccaccatcatcttgtgtgttattttcaccacgtcagtgtttgtagctcactgacttattttttggagtcgtctcttttgtttgaaattacagaaaaccttggaaacaagttttattatacctcttggggtttaaggctctcttcggcttgctataaatggccacctctccagccgtgtttcccaattatttctctttcctaatacacagtctcagctgtaattttattgttctcaaaaatactattttttaaatagttttatttcactgttccttgccagctgggcacctctctttctttcaatctttcccagttctgccttcttactggtggatgtccccataggcactgctgtgcccttcattatctctcatttcttgagttctactgacacttgatgttgataacatataaaccatccaatctctctctctctctctctctctctctctctctctctctctctttctctctcctccttttccctaatgagtctaagatttgtgggcagaatctccttctacgctggatattgcttatgaagagaagtgctgatggcacccctctttgcagtgatgagagatcgccatgttgagtttgtctataaggtgacactgtcgttgatctgctgtaggcagtgctaggtgagatctggaggctctatgaagcatctctgctgggtctggagtgactggagtaaagtgggtgccacctagataaacgatctgactgtcacagctggtggacagaacagagattgtggggatgggtgagacaacaaatgcatgccggggtatatgtgtacacgtatgcatgtgcacaaatgtttgcatatgttcaggtgcatgtgaggccagaggccaatctcagatgtcactacttaggagccatttggccagtggccttagaaattatgtctatttctgccttccaatcactttaattacaacatgtgtcaccatgctttgcatacatatgtatatgtatatgtatatgtatatgtatatgtatatgtatatgtgcgtgtatatatatatatatattatagagtatgggtgttttgcctacatgtatgccagcataccacatgcatgcctagtgcctgcagagcccaaagagggcactgggttctgtggaactggagttacagatggttgtgagctgccatgtgggttctaggaataaaatcaggtcctttggaagagcaaccagtgctcttaactgctgggccatctttctaagcccgggactggccattttttttttcatgaggctctggggatgaaattggggtctttgtacttgcaaagcaagtgctttacctgagctgtttatccagcctgaaatgctggccagaaagcaatcctatattgagtctggatgtttgacaaagtgcacaatacttttcccaaaaaggaaacacctgactaaatgttgatttagcacatcttttaaaatggaagcatttttttgaactttgggagccctctccacatagagggatactctctcagcctggatacactgaggagggtctaggccctgctccaaatgatgtcacaggctctgagggtcccccatggaaggcctcaccctccctggggagcagaaaggggttgggataggggcgtaggtggggaggaggggagggagagggaactgagattgacatgtaaaagaagattgtttctaatttaaatgaaaaagaaaagaaaatggaagcatttttaatactattacaaccccataaggtcatttacttcatcagatctcaggatgccatagaatcagggagagccttgattcatatcagtagcactctgtgttcagcaggcagctgctgcctgcattctgtttgtgttttgtgctcagcatgggcatcacagacttggtcttgtgacaaggaaacatttcaggctcccattatttcttcaccaaagttttctcaaaggcaaaactacagaaccccaatttcccatttgaacttaatgcattctggaatttaaaggaatcttggtctcttgattaaaagatgatttaaatttaaagggccagacaatttaattaagtgccagttgatgaatgctggctgctctgtgctctcatcttccctttctttttcatgagtctttgttacaagtctcttttctttggctaaccagtgggaatgcatgacccaactccttaagcttaatttttggcttgtttttgctgtatagtctgttttgtgtacaagatattttaatgactttcttcccatgagcaagatttatactagataattgctatttgagggagggagggagagagagagagagagagagagagagagagagagagagagagagagagaaagaacaagcgaacaaatgctagcagggcagaaattttaagctgatcacctcatttctaaaattttagcagaaataagcaagatgattagtttgaaatgtaattcatagtcaatggttaaaacaaaatacttgagttgctgattacagctcagatagatcctaagcatgcaatgagcttctggagtgattccaagtgtcttttgcattcaagagtgctctatggagataaaagaatcactaagatgagtgtgtgtgtgtgtgtgtgtgtgtgcttgcgcatgagcatccctgtatataaatgtgtatgtgtgcgtgcagtatatatacatggagagggaaacataagagtgagggaaagatgaagagaggtaggtaagagggaagggagggggacaggagagagagatagagagagagagagagagagaagatttattgtggggacctcttcacatatttctggaggctgagaagtccttcaatatgctgcctgtaggttgtagaacaggagcaccagggctgtaatttagtcctagcctgagaacatacaagggtagggaggaaggaagatgctgtggaaagcccccttccccagatgtcaaaacaaagtgaaacaggagcatggctgtctggaggcagcagatatgaggcatgtcccaactctgagaaggagcttagatttgcctccctctgctcttttgttctgcctgtgctctcagtgggcatcatgcccactcatgatggtggggtagattataaccaacttagtttctggtctgaaaggtaccagttaattttctcattgttgtgaccagatgcctgacaagagcaacttcaggaagaaagggcttgttatggctcacagtttgagggtatagtccatcatattgaggaagtcatggtggcaggaacaagaggtagctcctcacattgcatccacaggcaggaaactaggggaaaacaggaagtgaagcctggctataaaaccccaaggaccgaccccagtgatccacttcttccagtaagggtccaccccttaaaatttccaggaccttccaagcagtgcccccagctagggaccaaatgaccaaacacatgagcctacagggaacatttaacatctaaaccatactgtgtcttgtcagacagaagaaaagaggaatgcctgcatctatccagctttcttgttttgttccttttcatcagtctggtccccaggctgtgtgtgatggttccattcacatccagggcgtgtcttatttctcagttaatcttctcaggaaaaagtcctcatgtatgcccagagttgagtcttctaagtgatcccaaatctagtcacactgaccatgaagctcacccgtcagagcccatgtctttgagagcacccccagaaagacctagagataatatttccctgggtggtagtttgaataaaagtggcccacataggctcatagagtggcaatatcaagaggttgccttgttggaggaagtgtgtcactaggggcaggctttgcggtctcaaatgctcaagccaagtctagggtgacattcatgactgctgcctgcagatcaccgtttaactctcagctacctctccagcaccatttgtgcctgccttgcttcctaccataatgataatggactaaacttctgaactgtaagccaggcccaattaaatgtttttctttataagtgttgctgcagtcatggaaacctaaagacatcctgggtatgtgggtataccttacccaaccaaactgacacaaaactatcacattttttccccctgcttaattcattcttttaaatgctgtggtgatgcaacacaaactgtcttgaagaatttaagacttttggaccaataagcattcaaagaagaagggaaaactacctggaaaaaaattaccaagaaaagaaataatctgacctaatgtgatctttgaagtctccaaaaagaagattgaatccaagctgggtggaggtcacacacgcctttaatcctaccactcaggaggcagaagcaggcagatttcaaagtgagtttgaggcaaggctgatctacaaagtgagtttcaggacagtcaggactattaaacctgtgaagccagagaaaccctgtctgagagagagagagagagagagagagagagagagagcgagagagagagagagcgagagagagaagagaagatggagcctcacaatgacaatttttccaggattatgacaacactattaagctgaacaccttcaactaaagatcggttttggactacaaactgctcagaatgatttcgtggaggtcaaccgagatgatccaatctcacaaacactgctcagaacaatttggaggtggctatcagagatgatctagcctcacagacactgctcagaacaatttcaaggaggctagctgagatgatccagcttcacagactactctagccaggacttaagacaagccctgcactttcccattatgcagagactggataaaaatgatgcagcttgacagctaaccaaaagttctcttttcaggctctcttaaaggtgtcattgttgcccccagacagcaggaagtaactttaagaacatgatgcccacattctccaagaggtggggtgggtgttttttttgttttttgtttttgtcattcaatgggttatggatatttgtcattgtttagggatactggttataaaatgttgtttgttatggtcaggaagtaagttgaacaaaggggattagattcaagatttttgtttccaaaaaaaggatacagacatgatacgataaaaagattgctgaatctactcttgaaaagaaaaaaggaaggctatagatataatataaaaaggcaggttgttgaatctacttctaaaaagtataggtttgaagagattaaaaggtaaattattgaatttacttttaaaaagcaactactagttttaaatgttttacattggaattgaacttctgtatattgtatatgaatattgtatattgacataaatttgagattaatttgttaagacatattttacatatgtttctatttatcaatgcaatgtaaatttctagttcttgaaagttattattaccaactatataaaacaataaggaaatgtaggtgagtaattagtcaccttctataatttgaacttgtaatcatgttaggtattttttcaatgtcaaacatatatttcagaaagacaggccatcttcaaacacctacagaatatggcatttaaaagttttaataacataggttattttttatgacattgagacatgtctgctcctggcagccccaatataattcagagaagatgcggggcatcgaagaaactcacatagagttttctttctttgtggcaaaggtaagacactgggcaataaaagtgcccttgtctctactgctgacagtatgctgtctaaaatgaacaaacaggacacaaaaaagagtcactgcaaaccttgccaagagaaggcagtccactccttcagaaaatcctgcttcacagaaatgtctgtgagagatgctaggcctataggccaaagatggatgtctcaatgctgcagaggaaccttgggtgactgtccagacagccagctgtttctgtcatttctcacagtttttgggagtcacttgatcacacttcctgtttactcagttaatattatttccttctcaggtctctgagggagttgaagactggatagtatagttatagttttcattgtttaccagatttagaaaaaaaattcactaaagatgtgtaaattgcaaatggtttgagagacattaaaagataatttgaaaatgcaaattagaataggaaataagaacaacagtagacaatgaggtattttctctgaacgtgtcaaatgcaaatagactatatattttttctgaatgtatcaaatgtaaatggactaagcattgttgatgaacttatttactgtatatattatatataattattgtacttattgtatatagtttttcttctattagttgtagccttctttttgtattagacaaaaaaggggaattgtagtgatatattatttatgatttattaaagcttgcttgaggattcagaaagcaaagtcagccacaagccgtagaagccaggtacacacctttaatcccagcagccagaagctaggaggtggtggtacacacctttaatcctaggactcagaataaagagatagactgatctctgtgagttcaaggccacccagatctacacaagagtgaattagtctaaaagagaattatagctcacacctttaatcccaacattaaggaagtatataagacagaagcaagggctcagggaggcattcactctccagccacactgaggagaggcagcagtttgaggcttggtgaaaaacttgtgtgtgggtcagtcctttcagcctgatcttgaggtgagagctagtgtccggctgctttgtttttctgatattcagcttgaaacttgaaccccagtatcggcctctgggtctaatatctgtgtctgggccatttatttattcgtgttacatggtgatgtttctggtagcattgaaacactttgttggtcgtgttgacttctagggtactacgtggcagcagcatcttgagtttttaggtacagtatatacagattaaagagaaaaatactgtgggctacaatggtcctgtctcttcctgatgcatttgctttgtactttctcatctccttaatgcattttttttcttttgaaaaataattattatgaataatttcattcactcacagcagagcagagagcagcttagtcacctctatgcacccaacactgatacttgccaacccgcttttcttccatctgcatccctcctgctttgtcttttcccctacacaggattatttttgaggcaaattcccagtattcaagttgcttcatatgtaaatagctctgtgcaacatccctggctgacctggaactcgctttgtagaccgggctggcctcaaagtcatagagatccacctgcctatgcctctcaagtgctgggattaaaggcgtgcgccaccaccatccagcagccctcccaaattctaatgaatcacatctgtagcatcttctacttagacatggctgctttttgcctaggagccccagttctgcatgcctcgttcatgtgtgttaaatatggatcctcatgattctgggagacgcacagaaaagctttcctctcctgcgagcttttgttcacccgaggaatgaatggaaattcccactgcagggtggaagggttttcttttggtggaaacgtaaaagaatctccaatgtattatgaaaagggaggggaaaaaatgtggtgattgagattgtcggaccagcctttgtggtacttggtatttcatcctcaaacacggatgtgagcatgctctaatgcttggaggtgatgcatactctacatctttatcttgcagaggggggtggcagaggtgggggcctttaccacgtctgcttgctgcctggcctctctttcatacactggaaatgggatgggaatcagggcttgaaagttgggcactctgctagtcaaccacctcttaggttatttcccagcccagtctttttttttttatttctaggaactctatttttcaaagtggtggtttttcccaaggcaatgactttaaggaccctggacgtcgtccagcagtgcaaactcacaggaaacaggtttggctgatgttctgtgctgtgagagtgaggcactcgagaatatcaacaccagagctggaaatccttccagtcatgagagtcagattaaactcgttctgtatcacccatgtcctgttttaaggagagaggaagtctgttaccagaaagagtgctttgggtagaaagctcatgtccagaacaccaaggaccaggccaaacatttccatcattgttaatcctactggaagcaagaatagcttttcatgccccgatcttccttcatgacgaggtgtttgttgatggcctgctatggactggcaacctaacactcatctagtgttttgttacagctgtgagcagaacaaagccttggagacttggatgtcaatagagaataattggtgtgcaaactctatgtgtacctcagaattaagtgctgataagaaaaaaatgttgaacagatattaaattggggctgtcaagtaagaagaagacgcttgtcccaagtccagaatgtggtgaggaagtagactcctgggatatttctgggaagaacattccagacacagggaaggaaggctgcagaagccaagaaggagcctggctgacatgattgaagagcaacatggaagaaaaaggctgaagcagggctgggtagatagtaaacagaaacacagggatgcaggaaggcactgcaaagcgtgggtcagaatcccttattgttttcgtttaggaatttaatgtgaagttgattaccccccctacccccaaacaaatatgaggtttagcatgggtaggacatatagaagaaatgtttgaaatttataagatactctccctgatcagtagaactttgggttagaaataattgcagattgagtgtgagccatttctctatggtgtcagctatagggactcaagtttagcatccccttttggacaaagagctcatgtaatgcttggcaggattgtggccttgaggggagcctggagaaagcttatgcttgtagctatagagtaatttaggaattagcattggattgaaacctttgttggcaataaattttaaaatgagctaatttgctattgaccattgtgattagaataatcgccccattggaatatgtgtataatagggataaagggaattatagctctgaaggctgatgcatccatttcctcctatgaatagttaatgctcttgtcccaggaggacagtctctgcacacacgctagaatctgcagatttaagctggactaggcatgctggtttgcaataaatagtgacataaatcaggcaaagagccagcacagttttgattgggagaattaaagtcgttgggtctactttttacaggcagattgttcctatgattcctaatgtgtgttccctgtgcgccaagaggaaacttcattgaattttatttatgagtaacttatttggtattgggttttcattacattctcacagcctgtcttgtggtttgggggcttttttattatgcattttatgattatgaggtgtacttgcaaaaaagaaccttgggcaggagtaagagagaagatgtaatctgccaaacaatgacccaaaccgatatatcctttgctgatggcgtgaatctgtggagtcctgtttggaaaggtgattcaaataaatttttccctctagagggaaaagtgaccatctgtcctaatacaatcaccctcacccatctcacccattcacccacaactccactagccccctacccatccattcttctagccatctattcatctactctgtcaacccacccatccatctacccacccacctacctattcatccattttctcatccatccatccgtctatcatcttcctcctccctcactctattcctctcatagccaatatcaatcataggctgtagttctgggacctggaaagcaaaccaaatttccaggcacacatggaaatgaatccacagcgcatggatggagctaatcaccaatgagaacttagaaatggaaggatgacagagagactaacatttccttacctagggtgggggagcatattcatctcagggacctcccttcatgcctatgcacagacctatttttaattttttccatgatcacctgttttatgtctctaatcaatttcataataaagacattagacattttttcctggaaatcaaagattgtctaatcattctctcaatacacatgtgtggacatatacacaggcacagggaataccatgaaatcatttatacctgtaggttattgccaaatggacttggagaagattagaaaaatatcctcagaaaaatagaatgactgttttgtggccagagtcaagaagaggaaactggcttttcttggtgttgtcaaatggatctgctgggttaaaggcttatcaattttcatggcagataggttactctggaatgcttttgatttccagaagaatgtattgtggaatgtcacaccatgtcataaggtttaaaagaaatgtcttacttagatacaggatatctaaagtaatggtatagtaatagttctagcaatgccctgttttctggcctacatgcctccaggctgtcttactatgctagacctaacttttattctgtgatactaagaaacacatttccacactatcaaagtcatagcttacatagcccatactgctgtgttctgacatgagacccctgtgttctgtggctagttgtgttggattcatccatggccaccactggtgggcattgtcactgtccctatgtgtccagatttggtcttgatgaggcctctcagcttatacctagaaactatatacctcctggtccagactcagttaatgttcccatttggcaccttattgtttatgtagcaactttcctctatttattgatattttactatttgatatctatagcattcttcaattctgagattattttaaaccattttccccttagagctatttgactccatgaacacagacttacaccatgtcttaaaagaagacatgtgaagatttaactccattaccccaaccccaataatgtttaggtcattcattgctttgctgcgtgctgcaattttcactcacctctggtaaagatcacttcctttagcatctcactttaaatccagtgatcatggagttcatgtgggctcctggtactgccatgatatctggcttcacaaccatggtccgttcagtctccccaattcttttataaaaaataagatttatttttaatattttaaaattatgtatacatgagcatgtctgtatgtgagtatgtgcattgagagcaagtgccctcagaggccagtagggggtattagatcctttggagctggagttataggtggttttgagcagcttcccaagaagggtgctgataatcaaacttggattctctgcaagagcaatactcactctttactactgtgtcatctctccagtcccaggttccttattctttcacgatattcataccttttctgtcataatctccaacacacattttgccttcttttttcaataaaagcataaagaattagaatagagttttcttattctcagcgccatgtcttccacctacctgtttttttttttaatgctgcagagttcactgcctctcacttatgccaaagtcacatgtcatctctccatgttcatttaaagatgaatcattgcaaatgtgttgtgatgtttttccctgataaaacgtcaaccgcccatctcctttaaactaccatgtaatgtctagttctagaggaaaccttagcccagtgactcacaatgatctactcggttcctgaaactcctcatttctttttcttgaatttctctgggaatctctacaaaagtagcttagctgagatgactggccatcttctctcgcagcccagggtctgattctctggcctaccttactcctcagcatgtttgatttggtccactggtctctccttcgttgtgttgattctgtccaatcttcccattgtcactgttaactctggtgtttctttgcctcacaggacatctgtcaccagaaatgtcctcatttttctacttctaaatagttcagtacctcagagcatgtcacagactgctagcttgtatggttttatggctttaaatgttacctgttgggtttttagcccaacatttatgcctaagtatggaattctcccacaagctcctcacagctgactgtccacatcacattttcttttggctccctcaaatattacatgtccagaactaaactgatccccagcttttgctgtctagccttatagtaaccacaagcccatagttacaatttatcagaccctaaattttagcttgtcctagaatcttgttgcatttatttaacccactgcaagcccttctggctctttcctgaagatggaggtttctatcctgcctggtcctgtagccaattctcctcaaataaacacacaaagacttatattaatttacaaattgttggccagtggctagggcttcttactgactagctctgtcttaattattaacagatttctattaatctatgtatttccacaagcctgtggtttacccataatctggcatgttactccttggatatcaggatgtttctttgccatctatctttgccttcctctccccagccatcttgtcaggtagctccacttatgctttctgccaggctattggccaatcagtgttttattcttcaaccaataagagaaacatatatacagaaggacatcccccaccacttttcttaaatttcatctactctttcaatctctactaaagtcattttcttgtaatgaacaattttctaaaaaggctgattcattttacatttccacagcatttaggaagttttctctaaatcttagccaatatttgcttttatgagacatttaaaaagcttaaactaacattgtgcctatgaagagctgtcttagtgttatcttaatttactgaattcatttaatttattactgaatggtgttgatcaggttggccatcaagtttaattgctatccattctatttctagctttgtaacactattttctaatataatgcaaaatttacttattgcatttacttgctggttatttggctccctgaaaatcttttacccagtagaatgtcatcagggagttttctctgctatgcttgctgctgtttacttaaagtccatattctttagcaacatcaagatccttctcaacctgataccagacatctcctcactgttagttaatttctccccatcatttgtctaatctttcagcaactaggaacaaagctccagagtattggatctttcctatgcagacttttcatagatggtttttttaagtcaaaactaaaaatgtaaagaaggcagggagaacagagtcaatgttatcaccacagttcttgctggtgccctctgtgaacagcacaggagaggccaggaggcgagaggagtaaacttggctttctcttactttctgtccctgagggacctagtggtgtaaacatcttggtgtggcagataggagtctgtttaaagacatgcattttgtatgcagcctagtctctgagaagaatgccaactgcttgatatggtatgagccatctgtcccagatctgtttggcaagcatctttagagacagcatacacttctccaccacacagactttgtaaaggagtttcaaggctgacttttaatctgtgtgattgtgcttcattttctgacttttgaacccagcttacacagcaggatcacactgtcatctgctagcaccaaggtactgtcacaacctgtttccagggggtatatctaacatatatgtctaattcagaaaggcaaatgctctatgaatgaatgtctttgtatgtggaatatgaagaggttgatcttagaaacaacattataaaaggagtgaagagatggatatcgaaagggaagaaagatatcaaatactgccaagcttcactttgctaaggtctaaagagattcttttgtgatctgttacattggatagtgaccacagttaattatatgctgcatatctttaaattattaaaataagctgtatgtatttcataggcttgtagtctcagctatctgaggggccaaggcaggaggattgaatattcaaaaatagctcgagctagacaataagctcaaggctagcctgggcaactatgtcagtctgagttctcaagaggaggaatattgattgatttaatacatattaaaagtggatttattaggttggcttacatgacacacacacactaggtaacccaatacatgttgtgggtgaccttgcttggacacctcttggggaagggggtgagacaatgcagcaccaaggactcaggccctgggagtcagtcagtagcaaagcatgctgcagacttgtttactaaggaagttagacctgcccttatacaccctcccaaggtcctattggctcatgtggctgactctgctgcattgtcttttcctattggtgtctttctgtcagcagtctctgggaagaggcaggcttggctcagggaggaggtagctgccaggcatgctcatgcaggctggcctggacacctgagtgggacgactgtggcttgggtaggctggccggcagtttctcctacaaacaagggctatcttcacactcacgagtctgagaaactggtaggtgcccagccccaaaggctggaagctttagcagtcctaatctagtgttggaggtctagagggttcctgagagctgctggccttcagtccatgatagaagttggaagaatgtgggctctgatatcagcaaaggaataaacacatcagtggtggtaacagcagcagcagacaggatagataaacttgccagagagagacaaaggcaatgaggcaaaaaaccagagcttcccccttagacttcctttatctggtctccaccagaatgtgccacccacacttagggaaggttttcccactgctggaaaattctccatagatgtgccatctgttagttggttccagatccaatcaaattgacagccaccattaatcgtcacagcaacttaggtcttgtcttaaaacaaagggttaaaaatgtgctgagctatacctcagttcacaggtcagttaccaaacatgctcaatgccctaggttctattctgggactgcccaaataaatagataactaagtcaaagttttaaaagggaaggggaaagtagatgatttcaagtcttgtgagcaaaggtagtggtacttagggaaaaggaagcttggtcagcgcctggctcctgtgggaagtcggtagacggaattgctaatgattgatgggggaagtccttctgtgtatacgtttgtcttactggttgataaataaagcactggtggccaatagggaagcaagataggtggggctaggagtggaggaggattctgggaaatgtagtaaagaagaaggttaccatgtgaccctgggaagagaggacacacatgtctgacgccctcagtaagataagttcttataaaaatatatagatttatagttatggtctatattcaagacagagctagcaaataagaaattctagtcattggccagctctgtccaatataagactctgtgtgttatttggggccctaaagctgtggcagaacccaggcagcgggcagaaagagttatcgttacaaatgatggtctccaggggatcagtggttccttcatctcagggagcaaaacatggagatgggatattgtggagaatgaagcaccggctgatttatcttgggtgcaggaaagattttccatttgccagacaacttctagaaaggagttatgggtcaccgacttggggaactctcaaccttattctctctggaacagtgtgtgccaacattttctaaacatgttctagtgttatggactgctaaagggagtttctcaaaataaaagctctgttatcaaatgcttctcagagccacccatttaaccatgctctgagagtttccatagcaaaggtctacatggggcatgcccacatgttatgctttgtgagttcccagtggaacaggatctgaaaagggaaaagagttctaaactatattttatcacctaacctagttttaaaagaggattcttttaggattggtgtattgtatggctttttgttttgttttgttttttgagactggatcttgctacatagtcttggctggcctggttgctccagatttttaagatggacaagagggcagataaatctgtggatattgatgccatattctaaaattttcttgcatgttaagactttgtgaatataaccacacgaaattcaaaatctggcttaagatttctttagaaccacttatttaacagttttataaaaatgttctcctgagagctgccctagactgacaacaaggctgtcaatcctcctcctggtttctgaacacatgccttgaacagcaacagcagagctgcggtgagaagcctctcagtgggcttttgctgtgaagcatatggctctttctgaatgttcccaatgaaacaagagacagctccaaggccactcaggaggtgctgtgacctgggaggtgtgtgttacctagaatagttcactcagtaccctgaaggcttctctgaaagccctaagagtcacgtagctctttacatacgtgctgtgacacatggagattattgactgaaggcttgggagccacagtaacttaactggaatggtccatcagagaggaggcatgtctacatgtccttacctcgtactttgaaatgaggccaaaaaaagtggggaggagtgagaagggccatgctgggagccaaacagtgtgaaatggtgccgtgacaaccatttaacatatgtgagagtaagtttatatcaatctagaccctagaggtatctggtcagcagccaaaacaccaagtcctaactttgtcctcctctgggaaaggcatcaaatgcaggtgctgcagaaggatacctgtgtacgtgaacccatgagggattcactatgcacacaggctgtttctcagtgactgcgggctggtgtgaacacagaagggttgatcttcagtgactatggggctggtgtgaacatgaaggggttgatcctcagtgtctgtgggatggtgtgaacatgaaggggttggtcctcagtgttttgggggtggtgtgaacatgaagggctgtccctcagtgtctggggcattgccttagtgttatgcaattctccctcttttcctaagctattagtttcaaaaccttccttgaatactaaatccacagatgttacagttccttgtataaaaccatccacttctatatttgtgtataaataatacccatactcttgtatatttcaactcatttttggatcacttccaataactataacaatgtttatgttttgtgtagttgttataaattattgtttaaggaagaatcacaagaagtcaatatgtgttcaatacaaacacaatctttttcaaatattcttgatccacctttggtcaaattcatggaggcagagcccatgggaatggagggcagatgaatatatgatagggagaaagaaagagactgggaaggaactggttcatctcactgtacaactggaaagtttgcagtcaatagagcagattggaaaatgagaagggaaaggtttttctgttgtagtttttggcagaattactgcttcctaaggaaacccagtctttcctggcaagttacaggatgatggtaaccttcttcatttaaagtctcatgaatatagtttatgttcaggaatgacttcacatcaacatctagacagatgcttgacaaaactcttgggctccttagcttagcctagttgacatctgtcattaatcacatggacaagctcttacaatggtgctgtcaaatctgtgacagaggtttgctctgtcttaaacaaggtgagttttctaaggatcttctgtcttgagataagtggtggtcaaaccacatggttggggagagagagcaaagatctctgtccttacaaaggtccaactccagaaagcctcatgactcaagttctgtattgttgggacccagcaggaaaggttatcaactgacctgattcagggtgagctgtggattttagctgctctatccagagcattgatttatctcctcaaaatgatctgttacacagggttcttgcaagagatggtgagaacaaagtagggactcccagagcttagaagagcaggggcacaggacaccttttgtctaacttgccagtagatgtttgcattccagcataggtttgcaaaggcatactttcatcatcatatatttttcttttttgggtgtatggtggtggtgctggtggtggtgctgctgctgctggtggtggtggtggtggtgtgtgtgtgtgtgtgtgtgtgtgtgtgtgcttatgtttggaggctagaggtcaacataggtgtctttattgctctccaccttattttctgaaacaaagtctttcactgaacttggaactcaaggattcagctagtctggctgaaccatcctgtatcctagctgaaattacagtggtgtaccactacgtccagggttttacatgggtgctggatttacccaggtctgatgaacacttaccccctgagctgcctcctccacctctcactgttgtaccttatcatgttcttattgccaagagctgcaggcttcacagactctggcctttgttacatggccaaaccatcttgcttcagttcatagcaggagtatagaattctctgttataaagccattgctgggtgtgtgggttgggtcaggggagcctgggatctcctctagtcagttgactgtcatccttttgatttgaggacttaggttagtcttttggacactgtagatttaggtccttgtcataggttgctgaatgctggaactattgcttttaacaactgtgccctctccatctgaccctgtagttgaacgttttcctctgtgtcactggtctccttagactggtcccgtcccccccccccccgcttgagggttcccatagctgcttataaaataatcactcaaaggctaaaattaaatatcattgtttggccagtggttctggcttattaccggctagctctctctcttataaattaacccatttttgataatctgtgtatcaccatgtggttgtggcttactggcagttttctggcatcttacctttttggtgactacatggcatctccatcttcttcctctctctatctctgtttggacttcccacctagctgtattctgccctgtcataggccaaaacagctttatcaataatcaataaaagcaacacatatttgcagcacacagaaggacatcccacatcatggccccaacccatctaaatctttaaaactcttaaaggcattttctaggaagaaaaagctttcatttagtggttaatgttagattttcacatgactcctttctggaattgtaacgttcatataaattttgcaaagttttcaatgacttgtgttcccttaagagacagtgttgatatttttgaaggaaagattgtttttgtttattttgagacagagtttcattatgtagcccctcctccatgtgcctctggagtgctggaatcaaagacatgtgccaccacacctgtacgaaagcagtctttttgaagaaaacattttccatgctatcaaagagtgtacataggtgtacaaatgtctgaattaagaaaaataaagatatggaaccaatttttgagtttttactagcacatattaattacacataatgagtttcactctgacatttccaagtatgtaatatgttttgatcatattcatctgcatcaccctctctttctcctcctgcctatcgctttcctcttcccagctgcccccttctacttttgtgttgttttatgactagatgaatttcactaaggtggcttgtaagaaagagcatgagaaccttctagtggctacactactgatgaaaacatttctccctcccccagcaaccgtggcgcctataggtattagaatatttagaaacacaaaacctttgctagattttgtttttagcttagtaacattttcctttgaggctgtgtaagcaggtgcctgtgcaagtcaaagtgaagaaggctaagtgagtttcctctgaaaacagctcttcagccaccccctaagaagctaagtaatccatcatactttatcaccttgtactcagaagtaggaaagtggatcttgtccagagagatacattaggttttgatttatgagatattttgcttttgggtgaatatgctgattgacttggaataggagctacctgtactgttaacaacagctctcccaaatcacgcattctaagatgatgcttgctagttctaaggttcctttttatataatgtggacttgaagtaagctaagatccttctgttacattggtctgatggattgtggggaattcttatctgcctgtaggagacttggccctcagctgctcctatcttcactttccaaactctttcttcttgttgacttttagatgacaggacaaaagtgccatttgctaatgtagagacatgaatgaaaaagaatcctcaaattagggtgcccagaaattttgataacaagtgttttcctaaaataggactgagcaaggacagaagcctactctggagcaaagctgttaatgcatgcaccccagatgtgtgccagccgggtcttcattgcctcaaactccggtttctctgcctcactagagctcaccccctaaggtgtctcttgcagatttaagtgttctccacctggtacaacattgtctgatttttttctggggtattaattactttccatctttttttttgtgatcaaacagctgacaaaaaaacttaagttgggaagggtttattttgacttaaaggtcagggttacagttcatcatggagaggaaggcatgccagcctggtgtgaggtggctgggcacactgcacacagtcagaaagcaaaggtagaacagaaaatgaaacctggctgtgaaatatcacttcccaaccacagtgacttacttccctcagtgaggcaccacctcctagaaccttccaaaatagcaccagcagctgggaatcaagtattaaaacacaaaccggtagggccatttcacatttaacctgcatcacatgctgatatgcctgtcatctggctctgcactggtatgtaaattcttggacttgctctgttgatgtattcctggtgacatcatggggggactcgaattaccagatgctgggaaatatttattgaatgaacagaaaaggagtgagcattctatattatggtaggataacaaacccaggacttgtgagttaatggacctaaaatttgagcagtcagaacccagtatcacactttaaacagtgttagtgaaaaatacaatactctaaaaaataaattgccactttgagagatcatgacaagattatgttacttggggctggggttgtagctcagttggtagagtgcttgcctagcatggaaaagccatgggttttacccccacataaaactgattgagcgtggtggcacatgcttaatcccaatacttgaaaggtggagttcaaagtcatccttagccacacagtgggtttgtggctggcagaggatatatgataccttgccacaaataaaattaaaaactggtgctactgggaagttggtaaaagaatgtaatgtagatttcgcnnnnnnnnnnnnnnnnnnnnnnnnnnnnnnnnnnnnnnnnnnnnnnnnnnnnnnnnnnnnnnnnnnnnnnnnnnnnnnnnnnnnnnnnnnnnnnnnnnnnnnnnnnnnnnnnnnnnnnnnnnnnnnnnnnnnnnnnnnnnnnnnnnnnnnnnnnnnnnnnnnnnnnnnnnnnnnnnnnnnnnnnnnnnnnnnnnnnnnnnnnnnnnnnnnnnnnnnnnnnnnnnnnnnnnnnnnnnnnnnnnnnnnnnnnnnnnnnnnnnnnnnnnnnnnnnnnnnnnnnnnnnnnnnnnnnnnnnnnnnnnnnnnnnnnnnnnnnnnnnnnnnnnnnnnnnnnnnnnnnnnnnnnnnnnnnnnnnnnnnnnnnnnnnnnnnnnnnnnnnnnnnnnnnnnnnnnnnnnnnnnnnnnnnnnnnnnnnnnnnnnnnnnnnnnnnnnnnnnnnnnnnnnnnnnnnnnnnnnnnnnnnnnnnnnnnnnnnnnnnnnnnnnnnnnnnnnnnnnnnnnnnnnnnnnnnnnnnnnnnnnnnnnnnnnnnnnnnnnnnnnnnnnnnnnnnnnnnnnnnnnnnnnnnnnnnnnnnnnnnnnnnnnnnnnnnnnnnnnnnnnnnnnnnnnnnnnnnnnnnnnnnnnnnnnnnnnnnnnnnnnnnnnnnnnnnnnnnnnnnnnnnnnnnnnnnnnnnnnnnnnnnnnnnnnnnnnnnnnnnnnnnnnnnnnnnnnnnnnnnnnnnnnnnnnnnnnnnnnnnnnnnnnnnnnnnnnnnnnnnnnnnnnnnnnnnnnnnnnnnnnnnnnnnnnnnnnnnnnnnnnnnnnnnnnnnnnnnnnnnnnnnnnnnnnnnnnnnnnnnnnnnnnnnnnnnnnnnnnnnnnnnnnnnnnnnnnnnnnnnnnnnnnnnnnnnnnnnnnnnnnnnnnnnnnnnnnnnnnnnnnnnnnnnnnnnnnnnnnnnnnnnnnnnnnnnnnnnnnnnnnnnnnnnnnnnnnnnnnnnnnnnnnnnnnnnnnnnnnnnnnnnnnnnnnnnnnnnnnnnnnnnnnnnnnnnnnnnnnnnnnnnnnnnnnnnnnnnnnnnnnnnnnnnnnnnnnnnnnnnnnnnnnnnnnnnnnnnnnnnnnnnnnnnnnnnnnnnnnnnnnnnnnnnnnnnnnnnnnnnnnnnnnnnnnnnnnnnnnnnnnnnnnnnnnnnnnnnnnnnnnnnnnnnnnnnnnnnnnnnnnnnnnnnnnnnnnnnnnnnnnnnnnnnnnnnnnnnnnnnnnnnnnnnnnnnnnnnnnnnnnnnnnnnnnnnnnnnnnnnnnnnnnnnnnnnnnnnnnnnnnnnnnnnnnnnnnnnnnnnnnnnnnnnnnnnnnnnnnnnnnnnnnnnnnnnnnnnnnnnnnnnnnnnnnnnnnnnnnnnnnnnnnnnnnnnnnnnnnnnnnnnnnnnnnnnnnnnnnnnnnnnnnnnnnnnnnnnnnnnnnnnnnnnnnnnnnnnnnnnnnnnnnnnnnnnnnnnnnnnnnnnnnnnnnnnnnnnnnnnnnnnnnnnnnnnnnnnnnnnnnnnnnnnnnnnnnnnnnnnnnnnnnnnnnnnnnnnnnnnnnnnnnnnnnnnnnnnnnnnnnnnnnnnnnnnnnnnnnnnnnnnnnnnnnnnnnnnnnnnnnnnnnnnnnnnnnnnnnnnnnnnnnnnnnnnnnnnnnnnnnnnnnnnnnnnnnnnnnnnnnnnnnnnnnnnnnnnnnnnnnnnnnnnnnnnnnnnnnnnnnnnnnnnnnnnnnnnnnnnnnnnnnnnnnnnnnnnnnnnnnnnnnnnnnnnnnnnnnnnnnnnnnnnnnnnnnnnnnnnnnnnnnnnnnnnnnnnnnnnnnnnnnnnnnnnnnnnnnnnnnnnnnnnnnnnnnnnnnnnnnnnnnnnnnnnnnnnnnnnnnnnnnnnnnnnnnnnnnnnnnnnnnnnnnnnnnnnnnnnnnnnnnnnnnnnnnnnnnnnnnnnnnnnnnnnnnnnnnnnnnnnnnnnnnnnnnnnnnnnnnnnnnnnnnnnnnnnnnnnnnnnnnnnnnnnnnnnnnnnnnnnnnnnnnnnnnnnnnnnnnnnnnnnnnnnnnnnnnnnnnnnnnnnnnnnnnnnnnnnnnnnnnnnnnnnnnnnnnnnnnnnnnnnnnnnnnnnnnnnnnnnnnnnnnnnnnnnnnnnnnnnnnnnnnnnnnnnnnnnnnnnnnnnnnnnnnnnnnnnnnnnnnnnnnnnnnnnnnnnnnnnnnnnnnnnnnnnnnnnnnnnnnnnnnnnnnnnnnnnnnnnnnnnnnnnnnnnnnnnnnnnnnnnnnnnnnnnnnnnnnnnnnnnnnnnnnnnnnnnnnnnnnnnnnnnnnnnnnnnnnnnnnnnnnnnnnnnnnnnnnnnnnnnnnnnnnnnnnnnnnnnnnnnnnnnnnnnnnnnnnnnnnnnnnnnnnnnnnnnnnnnnnnnnnnnnnnnnnnnnnnnnnnnnnnnnnnnnnnnnnnnnnnnnnnnnnnnnnnnnnnnnnnnnnnnnnnnnnnnnnnnnnnnnnnnnnnnnnnnnnnnnnnnnnnnnnnnnnnnnnnnnnnnnnnnnnnnnnnnnnnnnnnnnnnnnnnnnnnnnnnnnnnnnnnnnnnnnnnnnnnnnnnnnnnnnnnnnnnnnnnnnnnnnnnnnnnnnnnnnnnnnnnnnnnnnnnnnnnnnnnnnnnnnnnnnnnnnnnnnnnnnnnnnnnnnnnnnnnnnnnnnnnnnnnnnnnnnnnnnnnnnnnnnnnnnnnnnnnnnnnnnnnnnnnnnnnnnnnnnnnnnnnnnnnnnnnnnnnnnnnnnnnnnnnnnnnnnnnnnnnnnnnnnnnnnnnnnnnnnnnnnnnnnnnnnnnnnnnnnnnnnnnnnnnnnnnnnnnnnnnnnnnnnnnnnnnnnnnnnnnnnnnnnnnnnnnnnnnnnnnnnnnnnnnnnnnnnnnnnnnnnnnnnnnnnnnnnnnnnnnnnnnnnnnnnnnnnnnnnnnnnnnnnnnnnnnnnnnnnnnnnnnnnnnnnnnnnnnnnnnnnnnnnnnnnnnnnnnnnnnnnnnnnnnnnnnnnnnnnnnnnnnnnnnnnnnnnnnnnnnnnnnnnnnnnnnnnnnnnnnnnnnnnnnnnnnnnnnnnnnnnnnnnnnnnnnnnnnnnnnnnnnnnnnnnnnnnnnnnnnnnnnnnnnnnnnnnnnnnnnnnnnnnnnnnnnnnnnnnnnnnnnnnnnnnnnnnnnnnnnnnnnnnnnnnnnnnnnnnnnnnnnnnnnnnnnnnnnnnnnnnnnnnnnnnnnnnnnnnnnnnnnnnnnnnnnnnnnnnnnnnnnnnnnnnnnnnnnnnnnnnnnnnnnnnnnnnnnnnnnnnnnnnnnnnnnnnnnnnnnnnnnnnnnnnnnnnnnnnnnnnnnnnnnnnnnnnnnnnnnnnnnnnnnnnnnnnnnnnnnnnnnnnnnnnnnnnnnnnnnnnnnnnnnnnnnnnnnnnnnnnnnnnnnnnnnnnnnnnnnnnnnnnnnnnnnnnnnnnnnnnnnnnnnnnnnnnnnnnnnnnnnnnnnnnnnnnnnnnnnnnnnnnnnnnnnnnnnnnnnnnnnnnnnnnnnnnnnnnnnnnnnnnnnnnnnnnnnnnnnnnnnnnnnnnnnnnnnnnnnnnnnnnnnnnnnnnnnnnnnnnnnnnnnnnnnnnnnnnnnnnnnnnnnnnnnnnnnnnnnnnnnnnnnnnnnnnnnnnnnnnnnnnnnnnnnnnnnnnnnnnnnnnnnnnnnnnnnnnnnnnnnnnnnnnnnnnnnnnnnnnnnnnnnnnnnnnnnnnnnnnnnnnnnnnnnnnnnnnnnnnnnnnnnnnnnnnnnnnnnnnnnnnnnnnnnnnnnnnnnnnnnnnnnnnnnnnnnnnnnnnnnnnnnnnnnnnnnnnnnnnnnnnnnnnnnnnnnnnnnnnnnnnnnnnnnnnnnnnnnnnnnnnnnnnnnnnnnnnnnnnnnnnnnnnnnnnnnnnnnnnnnnnnnnnnnnnnnnnnnnnnnnnnnnnnnnnnnnnnnnnnnnnnnnnnnnnnnnnnnnnnnnnnnnnnnnnnnnnnnnnnnnnnnnnnnnnnnnnnnnnnnnnnnnnnnnnnnnnnnnnnnnnnnnnnnnnnnnnnnnnnnnnnnnnnnnnnnnnnnnnnnnnnnnnnnnnnnnnnnnnnnnnnnnnnnnnnnnnnnnnnnnnnnnnnnnnnnnnnnnnnnnnnnnnnnnnnnnnnnnnnnnnnnnnnnnnnnnnnnnnnnnnnnnnnnnnnnnnnnnnnnnnnnnnnnnnnnnnnnnnnnnnnnnnnnnnnnnnnnnnnnnnnnnnnnnnnnnnnnnnnnnnnnnnnnnnnnnnnnnnnnnnnnnnnnnnnnnnnnnnnnnnnnnnnnnnnnnnnnnnnnnnnnnnnnnnnnnnnnnnnnnnnnnnnnnnnnnnnnnnnnnnnnnnnnnnnnnnnnnnnnnnnnnnnnnnnnnnnnnnnnnnnnnnnnnnnnnnnnnnnnnnnnnnnnnnnnnnnnnnnnnnnnnnnnnnnnnnnnnnnnnnnnnnnnnnnnnnnnnnnnnnnnnnnnnnnnnnnnnnnnnnnnnnnnnnnnnnnnnnnnnnnnnnnnnnnnnnnnnnnnnnnnnnnnnnnnnnnnnnnnnnnnnnnnnnnnnnnnnnnnnnnnnnnnnnnnnnnnnnnnnnnnnnnnnnnnnnnnnnnnnnnnnnnnnnnnnnnnnnnnnnnnnnnnnnnnnnnnnnnnnnnnnnnnnnnnnnnnnnnnnnnnnnnnnnnnnnnnnnnnnnnnnnnnnnnnnnnnnnnnnnnnnnnnnnnnnnnnnnnnnnnnnnnnnnnnnnnnnnnnnnnnnnnnnnnnnnnnnnnnnnnnnnnnnnnnnnnnnnnnnnnnnnnnnnnnnnnnnnnnnnnnnnnnnnnnnnnnnnnnnnnnnnnnnnnnnnnnnnnnnnnnnnnnnnnnnnnnnnnnnnnnnnnnnnnnnnnnnnnnnnnnnnnnnnnnnnnnnnnnnnnnnnnnnnnnnnnnnnnnnnnnnnnnnnnnnnnnnnnnnnnnnnnnnnnnnnnnnnnnnnnnnnnnnnnnnnnnnnnnnnnnnnnnnnnnnnnnnnnnnnnnnnnnnnnnnnnnnnnnnnnnnnnnnnnnnnnnnnnnnnnnnnnnnnnnnnnnnnnnnnnnnnnnnnnnnnnnnnnnnnnnnnnnnnnnnnnnnnnnnnnnnnnnnnnnnnnnnnnnnnnnnnnnnnnnnnnnnnnnnnnnnnnnnnnnnnnnnnnnnnnnnnnnnnnnnnnnnnnnnnnnnnnnnnnnnnnnnnnnnnnnnnnnnnnnnnnnnnnnnnnnnnnnnnnnnnnnnnnnnnnnnnnnnnnnnnnnnnnnnnnnnnnnnnnnnnnnnnnnnnnnnnnnnnnnnnnnnnnnnnnnnnnnnnnnnnnnnnnnnnnnnnnnnnnnnnnnnnnnnnnnnnnnnnnnnnnnnnnnnnnnnnnnnnnnnnnnnnnnnnnnnnnnnnnnnnnnnnnnnnnnnnnnnnnnnnnnnnnnnnnnnnnnnnnnnnnnnnnnnnnnnnnnnnnnnnnnnnnnnnnnnnnnnnnnnnnnnnnnnnnnnnnnnnnnnnnnnnnnnnnnnnnnnnnnnnnnnnnnnnnnnnnnnnnnnnnnnnnnnnnnnnnnnnnnnnnnnnnnnnnnnnnnnnnnnnnnnnnnnnnnnnnnnnnnnnnnnnnnnnnnnnnnnnnnnnnnnnnnnnnnnnnnnnnnnnnnnnnnnnnnnnnnnnnnnnnnnnnnnnnnnnnnnnnnnnnnnnnnnnnnnnnnnnnnnnnnnnnnnnnnnnnnnnnnnnnnnnnnnnnnnnnnnnnnnnnnnnnnnnnnnnnnnnnnnnnnnnnnnnnnnnnnnnnnnnnnnnnnnnnnnnnnnnnnnnnnnnnnnnnnnnnnnnnnnnnnnnnnnnnnnnnnnnnnnnnnnnnnnnnnnnnnnnnnnnnnnnnnnnnnnnnnnnnnnnnnnnnnnnnactatccctggagtacatgcacacgtctgcccttttaatgctcctgcagcacacttggtggttcacgttaaattaagggacacactgattgacaaggctcacagtcagcagctgtgtcttgtcatgtcagagtgtggcctgaatgtcagcaacttccgagttccatatcagaggatggcggtgtctatgcttaactggagagtgactgggtggtgctcatgttagagacccacagctcctgaaactctgtggctgtctgaccttcctgtcactgtgtcacctctgttggcagagggtatttcagccaactgtgagtcaaacaatggaggtgctgacatggccttccatatctgagaatggcctcagggtccagagctacaggaactatgggaggaagatagattgtcaaatgtcagcttagaactagcggtccctctcactgttaagttgaacttgactaaatcacttaatgtctttgagccatgttttttttttttttttttcatctggaaagtaggagtcattgtaagtttaccagaaaggcttatggggcacactgttgggggatagataccttatactataaagtatccatcttataatactatataatctacataatatataactaccttatactgtctaccagtttcagcttagttattaggctctttgttttctttatttattgttttgttcggttcttcacctttggcatgtctaagtcttaccctgatagcacacatggaatctatcatttgaaagggaacttatggttcatctgtttaaaactctgctaccattcctttctaaaattcttattcttgccgggtgttggtggtgcatgcctttaatcccagcactcgggaggtagaggcaggcagatctctgtgagttcgaggccagcctggtctccagagcgagtgccaggataggcttcaaagctaaacagagaaaccctgtctcgaaaaaaccaaaaaaaaatttcttattcttaaaagacacacacacacacacacacacacacacacacacacacacnnnnnnnnnnnnnnnnnnnnnnnnnnnnnnnnnnnnnnaaaaaaagaaaaagcagagagagagagagggagagagagaggaagggagggaggagggagggagatacacacagagacaagtgcaagcacaaacataaataaacatgtacaaagacacacaaaaccatattgttttctacccccatccccatttctggttgtaaccaaagaacaatgacaaagaaactttcattactgaatactccctggattgtcatgaagccctgtgatgtttcacatttataattgaccaaagcctcctcagtgcagtactttgccacaatgctcaggggtggcaatgaacccaaggctctgaggaggcttgctaggtcgttacattatttgtagctgactaatattttcaactcaaaatggtttcatcaaggcatagacactactgtaaggcaagggacacctgtaagtttatatttctaagcaggactgctgttttgcttatttgtattaataataaaaagaaaacattgttggaacagcaataacctactctagttaactcaggtcagtacttttttaaaaattgctctagtaaaataaggaattattttttgaagtgtttatacccaataaaatatattcatcccgacaacagtgttgcgcaaatggtggagaagaaaccctcggttcgttcccaggaccctggacagcggcgggtgctggaccgggcagcccggcagcgacggatcaatcgacagctcgaggctttagaaaatgacaatttccaggatgacccccacgcaggcctcccccagctgggcaagaggctaccgcagtttgatgatgatgcagacacaggaaaaaaaaagaagaaaactcgaggtgaccatttcaaacttcgcttccggaaaaacttccaggctttgctagaggagcagaacctgagtgtatccgagggccccaactacttgacagcctgtgctgggcccccatcccgaccccagcgtcccttctgtgctgtgtgtggctttccatccccatatacctgtgtaagctgcggtgccaggtactgcacagtgcgctgcctgggcacccaccaggagaccaggtgtctgaagtggactgtgtaaacctggcatcagggagaggaagtccctgcaaccattaattaccccagaccatccccaaaggacagagagaggagctgtccactcacccagcaaaattgtccccactgttgtggggttgttcagcccacagagcgctgtgataataaatggcctcgtgaaaggaaaaaaaaatattcatcattgttttcataatgagatagtttaaactcacaacctggtttgaatgaagttcaagagaactggttaaaaacaaagccagaagcttaggagattgcttcgtgggtatcatgcttggtgcacaagcacaaagacctgaggcattcccagagcacacatataaaagacaggagtggtgcatacccctgtattaccagggcagggttaaggaggagtaaggaggattatccgaggctctctgaccaacagcctagctcaaatgatgagttcctggttcattgagagacactatctcaaaaaagtgaatgcctgatgcagacttctgaataactgatgcacatggatgcatacacacaaaaaactcaagattgatacagagagatcaagttttggttctccacaaagcagaccttcaaaaggtcagtgtaagaacaccatggatgctatctgcctttaattctctaatcatcattgtgtgtgtggtggtgcctctcacagaagaaatttggcctctggaaaaggggggcagattatgtaagattacaaaggctaattgcaagataatttgagtcaccattgatagaattagcgagggtaaagatgatggcttcagagtttcacaattgtttaatgaacctggccctgtgactcaattccaacccctccctgtttcattttctgtggacagcagcagaggcactgctgtgcggatcaaatgggaatttgcttaagggcctggaagaaatttagattgctgtgttctgtgattcatgcggcaagtaacttaactcataaatgtcttatctgagggctcaaccttacctcatacaattggaagtctgaacagttttctcataaatgtcaagaaagggtggcacaatcaggtgacagatggtgggtttccagtgattaaaatacttagcattctttaatagctttttccaataatgaaaacaagaaatgagtcttaaacatgttgactcccctgagcaaataaatcattatactcatgatagaataagtagtaacaagcagaggatgttagggtagaatatcagactaaaacccctgtatcctcattaaaaagccaccaccaccaccaccacctccaccaccaacacaaaaccattccctacaagtgtcagttctgccaaactatcatgagtattcaaactatcttcagtattcaaaatctaagaattagcttcttaagcccatgttgccatgtgtcaccagtatcagaagtagaaaataacctcagggaaaggtctcataaaaacctacaccagggcttccaaatcacacagtcctagtcactaactttcttcttaacccttcacatttctattgatgtacctatgtgttctcatggtaagaaattttaatatagagtacattgtgaagtgttatggaaaacaataataacaatgacaaaccaggtaaccaactgtcaaccaactaactaactaactaaccaaacaagcaaccaaccaatcaaacaaggaaccaactgtccaccaactaactaactaaccaatcaaacaaccaaccaaccaatcaaacaaggaaccaactaatcacctgaataagcaactaactaaccaatcaacccccaatccaaacaagcaagcaaataaataaccaaccaggtaaccatctgaacaaacatagactctaaccagctaaccagatgggaaacagtgagttaagggtgacaatagaagtgtggtgtgctggacatacctagaggaggtccatggtggagatgtagttgtgtggagagactccacaagattccttgaagaaaagaaagtgagccttcaagggtgagtaggaggtctgaaatccctgtgactcatttgctcaaagtcactgactctcccgctgcagcaagcacacgtgcgcagaggtgtcaggtggctgtgcacatagctctgtctctgagaggttctgagaggaaggaagcagtgtctgaggagaggtgggacagacaaaaactgaggggagagcaaatcctgaactgcaaatctggctatgccctgggtctttgcctcatgcctgttgggcagccctttcttaatgatgatgtctgacataagggaagggtcatacatctccagaaggttggggctttgaggaaatctaggaagtgtagattcattcaactgttgccattgtcagcttggcgtcttcatctaggcaggaagggggagacttattgtcaacactttcccttagattgataaattggagacagacagctagagcttagagctgccaaataaatctttaggattgaaatataactgcactctgcatcaaactaggaggaatgacagcgtaccctaactgcactggcattgcttttggagttgaaacagtgagtgatgccagaagcttattttttatctttgtgggaaggcagcaatctacagtgggtggagtctgcatcataggggagaggccctccttggtgcccattcacctcattgatggccactcattgcctatgtctggcgtgcatgtgtccctggatgtccatattggtcttgtctatacatggctggagggatatgtgtataagaatcactatgtttctgtgtataggtgtgagcacatatccatgtgttgtaatgtagttgtatgatgtttatacctacaagtgtacctagttgtctatgtctcatgtgtttgtgtatataccttttgtgtgtcttggtacattcatgaatatattgcatatctgtgagtctgtaagttttattgtctgcatacctttgtgtgtatgtgtgtgtggttgtgtgttgggtgtgtatgtatgtgactgcttaacaacctgtgtatatttgtatgtacatgtatgcatttgtgtgtatgtctgtatatgtgtgtgcaggtatgtgtatgtgtgtgtggtcctgtatgtatgtgacttcctgtgtttgtatgtacatgtgggtatctgtgcgtgtgtattatgtatttgtaaatgcttgtatgcatatatatggagtatatatgagaggagcatatgtgtatgtatgtatatgtgttctgggcatgtctgtgtctgtctctatgtgtttgattgcctgactactctctctctctgtatacacatctgtgctggctagttttatgtcagcagagacaatgtagggtcatgtgtgaaggactcttaatcaataaaatgttttcattggcatgtataggcaagtctgtggggcattttctttattgatgattgatgtgggagggcccagcccattgaaagcagtgccacccttgggcaggtggccttgggtttatgagaaaacaacctgagcaggtcaggaggagaaagccagtaagcagcactcctccatggcatctgtttcagttcccaactccagattcttggccttgcttgagttcatgctctgacattatccttcagtgatggactgaaacctgagagttctaagtcagtaacagaaactttaactaagacacttctctatgtgtcttagttatttgtgtggagggattgtgtgtatgtgtgtgtgtgcgcgcgcgtgtgtgtctctgtgtgtgtgtctgtgtgtgtttctgtctctgtgccctagaagttgagctcatagaccctgaactgtattttccctatagtcatttacagcgtgaagaagattcctacctgatcagctgctgggtcagatgtgtagctgcctgagtggcatctgcttggttctcttggtttaaatctggtcagtgggaagagtcaaacaggggcattgagataagatatttatagccctgccactcaagaaccccaccccaaaccagaaaagcagttcatgttgaacaatccttgccatggcattggtgagtgtcacacccttgactttcataggctgctgaggtaggctcagccagcactgatcaccttttaaaatagctaggcactggattgctgtatagaaacaaatgtcccatagtcagaggcagaaatactgtggcagttttggatgtgccattagcttgttgattctgttgtctcttcccttcctagtgtgattaggaacatgctcatcagcctcttttctcagccacaaatactctgtgtttatcttggaaaaatgcttttttttcctgggctctcacattgtgtttaaattctgtctgaatttagttggatgaaataagctataattttttagacagttttgtcaaataagccataaaaatgtttagccaatttttgatccccagtttcagagctgggctctcctccagtccctcataccccaggaagtgcagacggagctcagtggcatatttttgcctcgttttctaactttcttcttggcagatgtgtgtgcaatctcaagaagcagcatcataaatatttaaatccaacttggctaattggggaggaagaagggaaaacacgagaaaggtagaatctgataccagggaagcattgtgactattttcgttttcaaaattgttcttgtggagcttgggcattttgtgatggcctctaatttaatgctttagaaacaaagggaagtgcagatcagccccctgtctctgtaggcaggggcctgaaaggggagagctgttgattccatagctcacagctcacactgtgaaatggtcctgccatcccttgtcctatgagcaatgtgactcgttctcatgggctttcagaaacactgctccctgcattcactcagccccatagaaacctgggtctcctcaggccctaaagagaggaagagctaatggctatgagctcagctctggatccactgcctgcccctctgtccatgacttctaccagcatcttctcaggatcctaggcagaaggccgctccatagcagggtgtagcaataactctttctgccagctgcctggggtctgctgccactttagggccccaaataacacacagagacttaatattgttacaaggctgctggccaatgactaggatttcttattttctagctctgtcttaagtatcaaccataaccattaatctatatattttataaagacttaccttgtcgaggatgccagcggcatgcgtcctctcttccctgggatcacatggtgactctctttactacatttcccagaattctccttgactcctagtcccccctatttgcttccctattggccaacagtgctttatttaacaaccaataagataaacgtatacacagaaggacttctcccatcatcaggctacaactgatccttcctggtctcatctcctgccgctttccttggctgctcagcatttgaagagcatcaaatggcattcatattaatgactttcctgagggctgcaaaaaaatacctagcaaaaacaacacaaggaagggaaggattatcttgactcaatgtttgaggatatagtcagtcacagcagaagtgtggggtggttggtcacagcccatctgccatcagaaacagagacatgaatgctgtcctcagatcactttgccctgttcattccaggaacccagcccatgagatggtgctgcccacatttagggtaggtcttagattcttggtcatacatctctggagacgccatcgtagacatgcccaggggtatgtctcctaggtgactccaaatcttatcaaagtgaccagcagaattaatcatcattgctctcaggtgttccatggtggcgtttccatattcctgttggtgtcttcagcctagaatgctatgtgctatataatcagtgtgggctggaggtaagtctgttttcacttttataacaaattgagaaacccgtgttccgaggccagcatgaatcagtgatggtgggagcttcctccagctttcagaattccaacttcttacatcttcacatcataaaagagagcgagagaggtttctcacttctcactaaactcatcccaagcgttccccccccaggaccaaaacagaccccaaaggctctgccttttaataccaccagaagggtggttaggacttcagcatgtggaatccagatgcagagggatcagtcataacaggtattgcgtaatccaggagacaatctgtaatctgtaagatcgagatatctttattgagataaataccagctaaacgcaagccagagcagcgaggccagagggacggggaaggagaagaagaaggggcttccttgacaggcgcagtcaggcacacctgcagccagcctctaacaggcgtggcttactgttccctacaaacagggattaacatctcagccccagcaggttccacgatcagcatctaaaatgccagcatcagtgacttgttccttcacactcagcctgtcttctgctgctaacacatctcagaacacaacctaaatactgaaagcctctggagtgtgactgggctttctaaccgctttgctgctaggaggaagtaggtaccttggagacagacactgacagggacaggaagaaagcagggtctcctttgctacattctttgcttaggccagatgcaactgtacaaactcagttgatgtagaaataaaacatgtgagtgttgagaagagtcaggaactcacccagggctctctgttaagcccaggactcttatcaagggattccatttgtctaatttgcctttcattcagtaagaattttcaaactgccagagatgggtaaaaatcaacatagaggaactaagtggaaattaatttgtccttcatgatcatacctttcaaaagacgacatgtgctccccacttagctggtgctgagcaggaaaccacagagtggtttgcatggatggcaacatttgctttgtgtgtgggtctgccacttgggttggatagggtgggggcagctcttctctgctgtacatgcacttggcctggacacaaggtaggctggaattggcagctctcggnnnnnnnnnnnnnnnnnnnnnnnnnnnnnnnnnnnnnnnnnnnnnnnnnnnnnnnctctgcaggcttctgcttcctcatcgacagacaaccaagcccagggtgggcatgctgagagaatggtcgggagaccctccttaagacctagtgtaggaaattatgcacagtgaattctgcacattccattcttctgggcgtacagccccatgcatatttcagaaggaacactggagaccagaaatactgtgaggctgtttatagaaactacagtctgctctgttggaatgagaagtcatttcaattgacttattgttccccatgttcccttccatcctagggagcagactccttcaggtgtgttctgtggtgggcaagagaattctttatgttctggggtaattaccacacacaacttcctccctaatgaatcctgcccttcttctctaacctctatttatcctacaggaagaactcttacacatatgaaaactagacccatgtggatttgagattttattacaacagcctcggggatagatagccccacagactattgggtaaggttaaatttagacctgttcatcgtggctcataatagtttgtacacaactgtaagatgtacaagaaatgggagaggttgatttaggctcacacaagctcacagcagtaaccaagctcacaaagtcctcacccaaacatctacatattctactaaagaagctgcctagaatgtattgatttgtatatattaactcaggttgtacccaattaagtagcattgttttagcaaacctatctctctctctctctctctctctctctctctctctctctctctcttccccccctcgcccccccatgatggatgtgcacatatgtgtgcagtgcccatgtctgtggacaccttgatgccatgggaggacatggagtgtcctgcttataactcctgacttgttcacttgcaacagtctctgactggacctgaagctaggccagtgggcagcaagccccaggccacctcctgtctctgtcccccacagcactgggtcacaggcactcacagctgcacctgactttatatggatgctggggatctaaattcaggtccctgtgattttaaagcaagcactctttcctgcttattccaagcctcttctctttaaaaaaaaatttaaatgaggaaaacctcacatgaattcggcatttagaaaaaatactaaggtgctttcaaattatacaagagtataattgagaaggtagagattataaaataatgacactaagtatttggatatttgcagtgttcccaagggttcctttcttgttatctgacccactgcaatcttcccaggaattctttctcttcacatgactggaaaatccccaactgaaaagatagggtcttggttccaccactagtcagctgcacagtcgtaagcaagacacaccacttctttataggccatttttaaaatgggtcatttgaccagcccatctccaatatttctctacagatgatatacaagaatgacatttactaatagggggtgttgtacactgaaacagggaaaacaataagaagaaagaaggttttcttttgatgttgaattacaaatgatcaaagccatatatagaaatggcatgtgtgtgtgtgtgtgtgtgtgtgtgtgtgtgtgtgtgggtgtgtgtgtgtacacacaaatatgtatgtgtatgtgtgcacatatatacatatatatatatatttctcaataagttgttattcaaactctctgaagacatttcaatacagagtttgaagaaatggatttaggatgtggttggccatcctttcaccacctatataacctcattataattggagaagcaaaattaaatattatttcataaaggcaaaaataggagagtgtttttttttttttttcactgtgagtgggtcttaggaatccttgcaatgtcaaaagctgccacactgccctggcaggtgagaagaggcagagctttgccctgcacccaatgttaactccaaggccacctttgggagagttggtgattctattaggtctaatgtgggcactttttcattaaatttacatttatagaatgcctcctgtattttggcagagtcttgttctgtagtctggctggcctggaactcacagaaatcttgctgcctcagcctcttgaggactgagattataggcacgagccaccatggctgactcacaccacctcctctgaagtaggtctccagtatttgaatctctactttcaaaaacaaatgtcattaagagaattacagttaccagagtcaatgcttagccagagcacctagtaaactctaacagcatacccatccttctatttaccaaacactctttggctgtgaaaacaagatgttagcacaccttgactgagtcagggggcttttatatgtcagctacagtcctatgagttaagtaatcatgaccttgtacacttcccacgttagtgacatttctcagtgcaactttgtagccacaggtaggttctggattccaattccagcttannnnnnnnnncttcagccttcattgtgttgaaatattttcaagggtaagtgagtcaataatatgaaaatactatgtgtgggataggaaacattaggtacacgttgattcttcagtaacaattatttttactgttggcttgaccctgtggacgatacagaaagggctggctttgaactgttaagtaacttgctctagtacacacattgtaacagaattggaaagtttattgtactgaatatcaaatgtctcaacttctaatctttgttattgttcaattgtacatttaacacagagagataatattatttttgttgtgattaggctgaagttggtttctataaacatttctttaaactttttttaacattattgttatggtggaagctccaccccagcccctggcgtccatatacccaaagagtctggaatgttatggtgcaagttctatccaagccctcctcccctctctctccaaaccctgcttcatctcagaaagcccgccaaatgatgacccctcccccagaggtgctcaagaccactcccccagggtatctaaactgtaccccagagaacagattcatggttttccggtctcccttttctgtttcccctttggggggtgctggaaggccatctgggagcgttgtatctattaaatgtgggcgttttctaatttggtttgatttggatggctgcatcagcagagaggcttatcagggtatagaaacttttcaatggtatttttattgattatttgggaattttgtagaatgtatcttgatcacactcacttccaattcttccaaagtctaccttcccacccttgtgctccacccccaaaagaagaaaacaatacataccaagtccaatgtgtgtagcccatgtactcattggagcgtggtcaaacttccagtggccaggaccttaaagataactgagttaccctacccctaccaccagtagtcatcaacagtgaggagctatacatcaacatctttaccacaatttataaggactctcaatggttttctgtcttgagtgtttcatttggggaggggggtgttgtcatcgaagccttcagtgatattataaacctaggaaaatctttcgttctttaaaaattctgtcaaatgaggaaatgttgatcattcttcattctaagaaggtccgtgatatttcccctctctctttgtggcaaagacttacaaagaaaagcccagcttcctgatgtagagctgtgtagatctttctagaacctggaaaaagagcaaaacaaaacagcagtggttgtgagtcttttgtaaacagtcaggaatctgtggcttgggctactccctcagaatggtctgtctcttattcttattcgaagatgacacattcttgtttttatcttttacaaaccttcacttgcaaaggtctaggatttttttttttttttttttttttttttaaaaaaacagaaaacctgttaagaaagtgctcgaaagaagtctcagaaatgcagtcagtcatttatcacaaaccagatgattaatttattaggggacagagaacgcattcccaggccaccccaggaaagcacaagagagaaaactgagcaacaaagagaaaagccaccacagcacaataggacaggttgggtcaaaagccacagggatggacaccgagtaatgcnnnnnnnnnnnnnnnnnnnnnnnnnnnnnnnnnnnnnnnnnnnnnnnnnnnnnnnnnnnnnnnnnnnnnnnnnnnnnnnnnnnnnnnnnnnnnnnnnnnnnnnnnnnnnnnnnnnnnnnnnnnnnnnnnnnnnnnnnnnnnnnnnnnnnnnnnnnnnnnnnnnnnnnnnnnnnnnnnnnnnnnnnnnnnnnnnnnnnnnnnnnnnnnnnnnnnnnnnnnnnnnnnnnnnnnnnnnnnnnnnnnnnnnnnnnnnnnnnnnnnnnnnnnnnnnnnnnnnnnnnnnnnnnnnnnnnnnnnnnnnnnnnnnnnnnnnnnnnnnnnnnnnnnnnnnnnnnnnnnnnnnnnnnnnnnnnnnnnnnnnnnnnnnnnnnnnnnnnnnnnnnnnnnnnnnnnnnnnnnnnnnnnnnnnnnnnnnnnnnnnnnnnnnnnnnnnnnnnnnnnnnnnnnnnnnnnnnnnnnnnnnnnnnnnnnnnnnnnnnntctgtggggggagaagggctccttgacactgtagggcagtgatgggacttctgcttcctgcctaggtctacgctaacactttgtaagtgtctgcttgctattcctctatagtcgctcagataccatgaggagggtataaggattcaggcattatgttgaccccgccccagggcaactggcaaggtacgggcatacccgcattcaggcagatacttaagcagctcaaggggccctgtgttgtgtgtctatgtcaagtgttatgtggctgcgtaaggactctatgcatgtgcaatcttcccgttttaagcaagcacctcccatctgttcatcccttcttcctctcctcctcccccttcttccacctttgtacccctcccctttcccttccatctctgtaggacagcgtaaggggagggtctaggggtacgcacaggctcaggattggtgtgcctctaggcttggagggcttgccctgtgttgattggtcaactggttgttatggcccataggccctcccagggtggttgctatgctctgtgcgtcattgctgtgtgcaatgtccgtaaagtacatccagggtcgtaaagcatagcgccaccagctaacnnnnnnnnnnnnnnnnnnnnnnnnnnnnnnnnnnnnnnnnnnnnnnnnnnnnnnnnnnnnnnnnnnnnnnnnnnnnnnnnnnnnnnnnnnnnnnnnnnnnnnnnnnnnnnnnnnnnaaaggtttcagctctcaatgtgatcttcactgccagaaccccagtggctgagtatatgccctttcctggtcttttaattaagaaatcaagcttttactaggcaaatacaaaacaaaactagtccaacaaccaaccaaaccaataaacagcccccccaccctattggtagctctggattgctgcttcctttggttctaaatcaggtgtgtgtgtgtgtgtgtgtgtatgtgtgtgtgttcacacatatatgaaactcactactgtgtcatttcctatgcctgccccatctcaccacctctcagattcttctgaggtttatttttcttacagtgtccaggggttttcattacagtttattgttgttatagttcagtttccccagaatcggaagcctgttatcaatgttttacattaaatcacttcacagttccatcattgccgtgtctgcttactcacgcacatgctcataaaccagattaagtgctggccactctcaacctcagtgcattaagtcccagaaagctcacagactggtgcctggagaaggggccccaggaaggagggggatgccatgcctcctcctttccagactccttgtctctagctctgccacctgctggtgttgaccttagccaggctcctccagccttagctgggatgaagcaggattacacgctgaggcaaatattaaatatttatttgtagacacatagttaagcatgggaatacctaaaagaattttctgggggagaagttctagatttcagggagttgactgtcaacaccaaccactccagccactgttggtgggagggttttggggcttccttgtggagtgatcagtcagcagccaatagagctaaggttttctttatttagacaaacaggtcaagtgcaggccaaagcgagagggagggagctgtaaccagcgcaggtagctggggaagcagaagagaccaggcacccttctgctgaccccttaagaagcctttctacatcagcctaagacttcctcttaccccgccctcacgggcgtgttcaggcacacctgtccgggtacctggggcgggactagagtctcccatatgtttttctcgatgccgctggaaccttctactgtgtcctatcctcctcctttgcaacagcatagcgccatgcatagcagttctctctcagcatgggagctggactggaatcaaatactatacacatacgttctttttcctctccttccgtttggaacagtttctgactatgacttttaaaaaaaaaaccaacaaaatgataacacagtgactgttttatatcattaacgttatttctaggcgctcagcagattgtgagctaaatcacatgcaaaaaaggtagaaatccagtactctgtagtagaaaaaggcattttgtagttgcgtgtaattaaattaaaaagggaagatacagaaaaaccatagaaacataaagactctaccccaaattagaaaactgattatggaaattagaacaggaagtattgttcgttcatcacttacaagcttcaggagtgattaatgaaggcacatttgtgcatttcacacagtaattaaatacttgccgtgctctgaagtgataggatttaaagcttagctaagaaaatttgttttattcaaacttaaacaaatattgctaatttgcctgtccagccatacagcatgacacagtatctttattaagtgccaatgaaatcatgttcaaaattaggtacagacatactgtttgcctgcactatcacctttatgagtcagggatgaaccacctccttcccgcaggttgcagtctggtgtctcaggcatcactggaatggagtgggccttctgtgggatggtgtgggaaaaacatttggcagttggatttgtcttgtggtccttgcaggttagcagttccttcttgggctgtgtaagaagtatttgtttcagaatcttagagtcttcttcacacccagctccatctttcttgaggctactgacagtgcaaacaattcttacctcaaaggggataaaggatagtttattctggaacacagattaaagctaccccaaagcccatgtcccagtgtggtaacagtttcgtgaagtttcatagtagcagaacaaaatataaatcaagatgttttaaaacacattgatggagacatcgggtagatggttaccagaacagcaaggaaatctcttttgggtgtcaggtgctctagtgacaaccctagcttttggattggtgggatctaggtgtttgctaagaacacatccctaagtttttggtcgtcacaggatgaatggctttcaaagcaaataaatagtccaagatgatctggctctggtgtttaacattttagctctccgtcatccccaaatccagccatttggccttttagaatttttaatgcaagcgtgacttccttccccttggaacttcagtccacatgaaaaaacatgcaattccttggaatgacttctcctgggagatttgaacagacatctacttacccaagaggcatccagccttgcttgttgtactagtgagcttaaccagcattacttatgggtgactcaatgtagctatcacaagggaaaaaaaatggccacactgagagctcactctgcccaacctgcaggcagctacagcacgcaagagtatctcaccccctgatactgtttactgctcatgtaacctctgagaggggccttgtgtcatgagcctctatccttccattcaccagggatatcacagtaactgaaacttccatttacaggaggaatccctgccctgctcctagagagggaaaaaggtaatcctcaatgccctgggccgatgagatctggaaaaatcagacaatgacagatcattacactggaaacacatctggaatatttattgtgggaacttaaacaacatgacaagatcacgtgtagaaactcctgcctggtgccagtactgcctaagtgctagtgacctgaaagtaaagaggccaggattcctgtcccccaagagcagtcagtcttctataggaaatacagtgatgattgagatgcagacactttgcctggcattaagatgggagtgacagtaatggtttgtggaggcaacactggggacaggagtatcctgggcatggcagactgaaggtttgatccccaggaaaaggcgagcaagactgtataatttgaggtggctgtaaatgtatagcagcctccctcatcatatgaccaaggaagaaggaatgggaaatgatggagtaaaatgcttgccctggcttgaggaaggcttggagaagtggctctttactctgaaagagcttcacccccacctccctcctgtggcatctgagtgactcaagttgatctttctaataaccagaggcatggatgatatagtccatcagatccagattcaaacaccagtttttcgtttgctgaacggccttgggtaagccactaaacctgtccgaggaagccttcctttcctaaacatgcagcccaaggggcagccattcctgaattcatatgagtcctgaacctggcagtagtaattgttagattgtctaggtggggaaactggccctcctaggaataggttcattccaaaccaaaaaacctctaggtggcaagaactccaagcaggacaagtaagtgaccatcaatcacatcacatactaactggtcctattggtcttccagaggccccatgccagggatgcccttgagacctttcaaacacctgcctcagccagaaatataagaaaacatagtctgttagtttatcttggtgtgagccaaacttggatgatgggggatgcccttctgtatatatgtttctcttattggttgatgagtaaaacactgtttggccaacgaggcaggaagataggcaggactagaagactaggagaattctgggaaaggtaggcagagaaaacctgccagagagtcgtcatgtaggctgccaaaggagaaataggtccggacccttctctggtaagataagaccacgtggaaatacttagattgatagaaatgggttaataattaagacagagatagccaataggccttagtcatcggccaacagatttataactaatatagagtctgtgtgtttatttggggccaacggctgcaggaagctccagcaatacttggatccattaccttatggtgtaacacctctccctccttactccctttacaggggaccttaaaagaaaggctctactctccctcagcaggcctgaagcatcttactttagacccctgatgccatgtgctgtgtgctgtgctgcccatttccagggcagcgttaatcaagctgttgcctgatgatttgactgtctcttgaaacctcccttctcctacagaaccctaaaacctaacaacagtaatgacagcaggagcaaccttccaagcagacgtactgacagtctgtagaatgtgagctgtgtgctgtggctcgcacaggtttggatttgatggcttagaaatatggggatgctgagttcaatatcacagatttctttctgtgcagagacgagctctgatgtgtgagaaggtcagagatactggaatgcctgcgtggcactccctatctgtgtcccctgggaaagcaactgcccctgtgttttgtaagtcccctagtttgatgtgctccaggcaggcagaggagaacatagttttcagctctttgtctagtcctaccctgccaagtcctttcaggacagactcctccaggggcagtagcagaactgctttagggctcctggagtttctctaggcaggactgcatggccctatgaccctatggcccaatcttgctccatttgcatatttccacccctgaacacatcccattttatagttatggagcacagcctctccctgctgtgattcttatgaacaacttgtatgtcttcgcagcaacagtcctgtgccaatcaatgttcttgtgtgttgtgcatgttcagcttattgaagaattcagggagagttttggagtcacagtaagtcactgagcaacactcttatctaaagcaaaatgaagaggcctcaaactttggggtgtcgtgatatttatccacacggcattcaccaacaatatttggtggcccagaagaagtaggaggctgggctgtttctgagctatgcactggtcaggtaggagacagagaagaccaatcaagaggagccttttttgtggtgtgactacgattggtgactgggcccctcccacatggctctagacaaaactttctatttgcatctgtgtaaatgtatatgataatagatggtaaaacctggaactgattaaaataataaagggagttactgtggtaagtttcaagatggattggtacagagagtaaataaattagtcaacatgtataaaatagtgttgagtacataggaagcattcaacataggatctggtatctcaacatggttagtacagtcccaaatttgcaccttcctatctgttaccagtttttcctggtctgtctccataggaaaggccataccctatcatttctgttacagaagagtgagcaatcttctttcccaaatatgtcacaactcattagtatgatatgggttacatttttgttccactgtctatggccaaaccaatgtcatttgctcattagcgttgattgtttcaactgagacaattatcatggcaagagagatgaatttcacagaggttgtcgagaggaacagaactagacactcttcttgggtccttcatgagggtcagacaatgacagtttgctttggttcactgagatagtagaagttcttcagtgcactgtgtgtgatggttctggtcatcctctgttcttcctacactggtgaaatctgccctgtgtagttcctgtctcctctgataactgttgtactttgtactcacttgtttgtctgtctgcctttctttttatttttctttttgttggttttgagacatcatctcatgtagcccaggctggcccctgacttgctctgtagctgaggatgagcttcagcttctgatcctcctgccgtcgcctctcaagtgctggggtcatctgtgtgcaccattggacggcacagctgtcttcccaagtgatgggtatgtgatgtcgttcgtctctttcccatcatccggtgactcttggttgcttcaaaatgaacacccaaatctcagatatgacccacaagaccctatcaggcctggatnnnnnnnnnnnnnnnnnnnnnnnnnnnnnnnnnnnnnnnnnnnnnnnnnnnnnnnnnnnnnnnnnnnnnnngccctatgtgagggagagggcctcctcccaccctcctcttttctcttcttacaccttcccttttacaggtttgtttctacctagtcttacagtctcagcttagctgttctttctcctggatgtcttccctggttgggaatctgcaaagatatgagaatccatggatactcttattttttttaagatttatttatttattatgtattnnnnnnnnnnnnnnnnnnnnnnnnnnnnnnnnnnnnnnnnnnnnnnnnnnnnnnnnnnnnnnnnnnnnnnnnnnnnnnnnnnnnnnnnnnnnnnnnnnnnnnnnnnnnnnnnnnnnnnnnnnnnnnnnnnnnnnnnnnnnnnnnnnnnnnnnnnnnnnnnnnnnnnnnnnnnnnnnnnnnnnnnnnnnnnnnnnnnnnnnnnnnnnnnnnnnnnnnnnnnnnnnnnnnnnnnnnnnnnnnnnnnnnnnnnnnnnnnnnnnnnnnnnnnnnnnnnnnnnnnnnnnnnnnnnnnnnnnnnnnnnnnnnnnnnnnnnnncctatttccttccctggaagacagttttgcaaaaattggtcatgatggcctgtggctcaaaaggctatggttgaatttttttctaagaagctcttatttgcatacattctgcaacgagtgtcttatggctttactggggaatgtcattttaagctgagagaagacagaggagatgttggttaatttgcatttagcaactatagatgccgttatctagtgaaggaacagaacgaactaggtttgtctgagaacaacaggctggatggtttcttctcattctgtgtttcctcttggtgcaaatgaaaaaataagaagtccttaaagccaacttcacagtaaggacgaaacacgagcagaagtcactggcgcttaattgtcgaagggagctggctctggtactactttcagcttttccctgcctgagttacaaaaataaaccttgttttatcaactgtgcttctggaaagaagtgtgtctcttgagaaatgaggaaaaaaattaagctctaaatatactacgcagtgattttgaaatattttatcttcttatgccagactgaaaacacgttctgtttgaaaatacagttttcttatgaagaagacctcatgatgcaaacattcaaatggtcttggttattttgaaataaattgttactttttgtatgcagtttggagaaaagctgactggcacaattattcaccaatttagtggctgtttacgcaggtcactgcagggtggcctttgctttgaccattgctggtgtttgtagacgttcctgaaggagataccatcttctccttgcccgtctactctctgagagtctgtaaagttctccatcctcgcagtagggaggaaaataattggggagctataggccaaggtgatagcaccaatagtcagttctcagtgtctatggccactgcaagaattattgattacaaagacagtttgtcgtcagacttctactggttcatagtgatagccaacctgcctttttacaattcgtattttcaattagtgcatattaactacatcttcacagccacacaaactcttcagctttttattttctcagttattgaagaccaacagcccttctccttttagcaaagcatgttttatttctatgctgtgagcaaactctctggatgtgctgcttctaacgttatagatttaatttagagcctgagttggaggaaaaggtcagaatccttttcttaaagctccagcacgtgcacacagcaaggccggatctcctttcatcggggacagtcttccctgttacagattgtggttatatattttagcaaatgcagggtcaaggcttcgtagccagccagtttgatgacagtttctctctgttgcctgggaaactgtccctcaaaagcaaaggcataaaataataatcaccacctctttggtcaaaattatgccacagggcagagctctcctagtcagcttgtctctgccctgaggtgttagctggactcatttgtatgcctataccattcaagacggatgcacttctaagtggggatgtggttcggttggtacatccctagcactcaagaagctttgggcttggtccccagcacagcataaactaggcatggtgatgcatgcctgcgatcccagcactccagaggtagacttaggaggttcagaagttcaaggtcatccttggctacactgagtgtttgaggccagcctgggatatataagaccctgtctttaaaaaacaaacaaacaaacaaacaaacaaacaaacaaacaaaaaacaacgaaaacaaacaaacaaaaaacaacgaagtagaagtgatctggagaatataaactcttaagacgataaacaattacaaagcaccacttttttctttgttaagagtttgcattattttggcctcatattctcttgcatgtcaaaacaagtttcattggcatttggttatgtgcacagtcttcagattgctaaagtggagtcagcggtagcagtaactctgtgagaaacagctatgtggtgttgcttagtcacagtggcacttgtaagctgtcttagctgctacaatcaggatctgtccttcttcaggagtctgctcaacacattcctgataatttttgtccactgtctgcttgcccccacctctgtcgtctacaccattgattttccagggcagtttcagcattcctgggcctcaggttcagtttccattctccctttacagccatgcacaggccatatcccttcccgtgtcagctcagagctattcctggctcatccctgccctcctcagctctgcccagggatcctcactgctcctgaaacacagtgacaggcatagccctgcctctgcgcttctgtcatgctgttcccaaggttgttcctcactttactctggcctttgtaatgtcacagatacagatttctccagcaagaaatcctgtttcctgtctgtgttgcaggccccattttgctacttccagaatctattctgtggatttttggttgaagttaaaaataacaactgaatctctgttatattttatagcatataattattgtacaaaatgatatggttagtatattgttgctggaggttcttgtctgccaggtcctgccacccttctcagccccaaataagcacacagatgttatattaactattaaactgttggccaatagctagggcttcttattggctagctctgtcttaattattaacccattactactaatctttgtatttctacgtggccttatcttaccggagaacacccggtgcgtccaatcctcccgatccctccctggcctctctctggtggtctctccctgcctacctttcccagaattctcctcatctcctagcctcgcctatatccctgcctctattggccaaacagtttttactgatcaaccaataagagaaacatatatacagaaggacatcccccatcatctcctcttttctgtctaaataaaatgagggtttttaactttaacataataaaactgcgtataacaaacaattatcaagtaagaactataattaacaatatttagtccactaacatttggcaaaatttaaagaaaatattctatcatctatcccatctttgtgagtctaaagtcttaaatgtaacttatcttttatcataactaaggaaaaccatagacataactattcgtcttcaactccatcaaagaccacagaaggatgccacatataagaggaaacttatgatacttgtctttctgggtctgaattacttcatttttccaaaatactcaggaaactaaattctacaaatttctaaacaccctcctccagccccaacagctttctatgttgctatacttttcagggctatagtaatgatataatatggcaagaaacaaattttctacttacaaatgaaatcttggacccctggtttcctgaaaattgaatttatgtgacttatgtctttgagaattggtttctaacagtagaataaattagccaaaaaagaagcaattattccaggggaagagttaattaatgctgtacacttgccatctccttagttgactgttgtcctctaaaacttaattgtgttgtcatttttgaaactcaaagatttcctcaagatatttgctccctggtattttatgtatatcacttcttttttaaaaaaacaatcacttagatttattttattttgtgtgtgtgtgtgtgtgtgtgtgtgtgtgtgttttccctatatgtatgtatgctcaccatacgtgtgcctcgtccccagggaggtcaaaagaaggcacagatatcctgggactggagactccagccctcaacatcacttcttaataacatgattaacatagtaattatgtaaatcaaaattttattggcatatagtcactgtacataggcctgggtacaagtatcatggggacattttcgcacaaggatgtaacatcctttgtgtatgtcctgcccccattgctccatgcctgtaactctcttttgatccctttgacagtttagaatctgttttcatgcttcatttgtatttataattttatataatcatataaaatctgggattcacaagtgagaaaaaaacgtgaactattttctgagtctgacttaacttacttactatgatgccctcctgttgaatccattgaccatactctctttatccattcctccgccgatagatgcttaggtcattagttgtcgtgaacagtgcagcaatacaatatctcccatatgtttagactcttttaggagaataacaggtggtataactggggctgttcattttttaaggaacctagtgtggatttctgccaaggctgtattagtttacatacccaccaatgatgtctaaggactcccttctggtcacatcctcaccaccatttgctgttatttttttcaaatttcagtgcagttttttccttttttaaaatttgaattagaaacaagattgttttacatgtcaatcccagttccaactccctcccctcctccactatcacaccctccctaactaaaatcctacctatcacatatcctttctgctccccctggatggtgaggccttccatagggtgtcataagagtctatcatatcctttgggataggtcctaggcccacccccgtgtgtcttgcttcagggagtattcctccatgtggattgggctcccaaagtccacaactatgctagggataagtactgagctactacaggaggtcctgtagatttccgaggtttcctcaataaaatccatgttcctggggtctggatcagtcacatgctggtgtcccagctatcagtctggggaccaagagctccctgatgttcaggtcagctgtttctgtgggtttcaccatcctggtctggacccctttgcccatcactcatccttctctgcatctggattccagttcagttcagtgattagttgtgggtgtctgcttctacttccaccagctgctggannnnnnnnnnnnnnnnnnnnnnnnnnnnnnnnnnnnnnnnnnnnnnnnnnnnnnnnnnnnnnnnnnnnnnnnnnnnnnnnnnnnnnnnnnnnnnnnnnnnnnnnnnnnnnnnnnnnnnnnnnnnnnnnnnnnnnnnnnnnnnnnnnnnnnnnnnnnnnnnnnnnnnnnnnnnnnnnnnnnnnnnnnnnnnnnnnnnnnnnnnnnnnnnnnnnnnnnnnnnnnnnnnnnnnnnnnnnnnnnnnnnnnnnnnnnnnnnnnnnnntttttttttctgctgagtagtactccattgtgtaaatgtaccacattttctctatccattcttcggtagaggggcatctaggctgcttccagtttctggcgattacagatagtgttcagtgcagttttaacctgcatttctctgatagttgatgatgctaaacacatttcatgtgtctattggacatctgtactttgtcttattgatataattttcatttttaaggcagttttaattatgtgtatgttgtgtctatgtgggactatgtaaacatgagtataggtgtcctcagagaccaaaggtgttggactcttagagctggagttgcaggccattgtgatctactctacatggattctggaactggaactcaggactgtaagggctcttaagttgctgaactgtctctccagccttgatacatttttttattattttattttatttttttggtgtttcacgacagggtttctctgtgtagctttggagcctatcttggcattcgctctgtagaccaggctggcctcgaactcacagagatccacctgcctctgtctcccgcgtgctgggattaaaggcatgtgccaccaacgcccggctgatacattttttaaatgattgatttctttcagccatgatttcctaacctgtaaggtagaagcagtagtcatcttactttaaagactaatgaagatggtatgatctaaggagtgggaaaaactttaaaaactataaaatataacacatgctagaaattctagtggcacagcttatttaaacttatttactttgtgtctcatttttccttcagacacacactttctctcaaagatagtgtcctagttacaatgatcaatgtggagtggagtaactacattttcacccactggaaatgatggtagatataagccatgagccccttaaatgatcaaatagctgtgtttattaagaatttacattttcaatgtttaactgagaagactaaaatccccagggattagacattgttttcttgattgctaatttattctattcctgatcaacatagtaacacctatgtctttgtttttcaaatgaaaatatgctgtctttatgggaacttctaaggtcatcgaatgcagtatcttataatgtgtgaatttttttaaaaattcaatttacaaaaaaaccccagcaatcacaagaggcatgaagagatagagactgaacaggactgtgagaagggaaactggagagccattcagatggtcgtcaagtagattcactatcaccatagagctttgctaccctgggaatctgagtttattgttttcagaggaaatagagattaatcactaacaggattttgtatgacatacctgtagaagtcaaaatcaaaatgagcttaaattagttctgacagacagctcttgaattattcatcatttcaatagaaaatacacccccactccctaccccttaacccccccccccctaaaattacagttgttcaaatatatgtgtaaaagacaaatatacagagtatgtattgcttctccatgcatatagagtacatcttcaaagtgcatagtttaagagaacatagtttacagcaaaatcaaaataaaaagtgattaaaaaaaaaacaaaacacctgattgttgaagaatcccttaaggaagtgcaatgctagcattaattggttgaaccctaaggacttttcacctaattagggagagtggatattgcttccaggcacttcacatttccagaaacaaaacaaaacaaaaaaagaccttcattgtcgatggggaggctgcatgtgtgtgcccaatcagtgcatttctgtagacactggccaccctgctccatgagacgtaagggcgctgtcaaggccaggcctcactctggctgagggcctctccagatctctccctgaagttttgggactcagcagctgtgtgcactgctctctgctcacaggggtcatggcttcttatgtgatgaaggatagaaaggcccagggtacacatctcatgaaggagatggcctgtgtgggagccacttcactgtcctcactggacacccctcagatcggagagttgtcaggaagccgagcttagcataagcaaagtgtaaataaatgactcaaacttggaatttcagcctcgctataacaaactcttagagcaggaaccagagcacggcttcagtgggtggccgtgtctgtgacttccactgactgtctctctgagatggcatctggagtttactggcccttgactgctgcctactgtgtggtagaggggtatggagtccctggagttagctgtcttgactatggaaggttcccagagtgaagcagaggatcttattgaggctcaggatgatttctgtcaggctgctgtgtccctaagctcttatgtggcttgtgagctaatgcagcttgcgttttcaatagaaattccgtctgtcctcagaaggaattaaactgatggggcagaatggagtaggagtggggggagaatgacatttaatcaccctgcaacttgacaagcgctgatcctgtttttattacttgggagttatcgtggcttttctacattaaaagccatccccattgtcttatttttagaacattgggtgacagagatggaaagtgcctattaaatagcaaacatgcctaacccaaaggaagcagacacagctaagctagacggtggccgtccagtggcatcttttagcttttcagtgagaatgtaacattaattctccaccccctcggttgtgtatctgtggaagtccaggctattggatctcctctgcatctgcttctgtcactgagaagggctgtgcatttggaggtttccttgtatcgtggcaaaatgcttaagtgttctgccagggttttagtcctaaaatataagcctggaagggctgggaaaatggctccataaataaagtgcttgctatagatgcatgaagacctgggtttagatcctcagcgctcacccaagaagcagggcattgagtgaggagccagcttgtaattcaagcactggagagatggagccaggatgatcccagaccctggccagccagtttggctgaatccatgagctgtaggttcagaggagagagactggggaagatgccttacgttgtcctctggcctcgaccacacacatgttcacacacaaatccacacaatgaagtcaggcaggagaaacctagaataagaataatgtttcagaaatcttgcatttttactttctctttaaggcagtctttcccctgataggacactgtgcaatgaggaggccagcagcccagcaggtctgagccaaaagggacattcttctgtaaggaatcgcagtgtgtgtactgttgtcacctttgcctggtagtgtgttttaccaggtggttatttattttcatgctctgtggagattattttctgactgaggcaaaatccaccagtgttttattttgagagtggaatatcatggagagatggaagagcaggccaccctgtgcctagcttggggttctatgtacaacaaatggtgtagtatctctcttctttccgccattcaagcactctgtgctgtgattccagcaggggcagggtggggtgtacctagagtattgttcagttagatcacagctctgctggtccaggcagaatcctggaaatgcctttaagagtgtggagtgtgaagggctttgcaatcacacnnnnnnnnnnnnnnnnnnnnnnnnnnnnnnnnnnnnnnnnnnnnnnnnnnnnnnnnnnnnnnnnnnnnnnnnnnnnnnnnnnnnnnnnnnnnnnnnnnnnnnnnnnttaacagtatctctccaaatgtctttctgaagatgctattccatagctgttcctaattgaccaaaacaggtgtgtggggcatttgccgctcagataggcttggaaaatgatgggtttagcacagacacagactctctctccctctcccaccctcattcttttcttatacattacatcctgactacagttttccctccctggactccactcagtcttccctccccaacctcccctctctcctgggcccacttctgctccaatttccttcaaaaaaaaaaaaaaaaaaaaaaaaaaaaaaaaaaaaaaaaaaaagaaaaaaaagaacaggcctcccatggatatcaactgaacatagcataacaagctataacaagaccaataagactaggcacaaatccttatatcaaggttggacaacgaaacccagtaggaggaaaaatgtcctaagcacaggcaagagtcagaagcactcccattcccattgttaggcatcccaaaagaacaccaagcctctcaaccagaacatatattcagaggacctagctcagacccatacagggcctgtgattgttgcttcagtttccattaacttctaagagccatgcttggttgattctgtgggctgtgttctcatggtgttcttgacctccctctggctcctacaatccttcctttccttgttctgcaaggtttccctggcactgcctagtgtttggctatgagtctcagcatctgttcccatcagtttctgggtgatacttctctgatgacaactgggctaggcactgatctatgagtatagcaaactatcactagtaatcattgaacttttttccaattgtctttggttctgttctgtatctctgggctgtccagcctctggttcctagtcatccaggtagtgccagtatctctctctcatggcatgggcctccagttggaccagtcattggttggccactcccacaagctctgagccaccattgccctagcacatttttcaggcaggacagattgtaggttgaaggttttgtagctgggttagtatcccagtccttccactggaagtcttgcctggttatagaaaacagccagttcaggctctgtaacctccattattaggagtctccactagggtcactcttgtagattacagggagtttctattgcacttacgtttccacactgccatgcaaatgcccaccaattctcttccagtactctctccctctacccatcccccaccctgtctgatcccttttattcccatccacacccacccccagtccacctacaaatctattgtactcttcttcccaggaagatccatgtgtccactcttaacccccccttgttacttagcctctctgggtcaatgaattgtagcctggttatcctttacttaacagctaatgtctacttataagtgcatacagactatgcttgactttttgggtttgggttaccttactcagaatgatttttttctggttccatctatttgcctataaacttcacgatgtcattgtttttaacagctgagtaacactgcattatgtaaatgtaacacattttctttatccattcttcagttgagggtagcacagatagacattttactgtagtgtcctctcaaaagtattattttttttagcatatgtatgtgtgtgctgtgcatgtatatgtactcatatgtgtgtgtgtgtgctcatggatataaaggcccaaggttaacatctgatatcttcatggattgcctctctacctcatgtactgaggcaaggtctctcattgaatctagagctcattggtttggctagcttgactaactgattgactgactgagcttgctctggaggtctcctgtctcttccacctcctatgttctaggattgcagcatcctttcatatccgaatgtgctctgtgaatctttaagaagaaaatatgaattcagcattgaccaaggaatgacttttcttagggaaacatttcttaagaccaacattccaaagcatataatctggggatgaacacacagggtatagaacttggttataatgcccagtttgtcctcctggtaagaaacagtacactggtgttagaattggtaatggacattcttaggagtggcatgtgctatttgtttgttgccatgctaggcccgatcgtgtaattggactgttgaagatgggatttggagtttgggatcttgtgtatttattcacacaatgatgatttcagaagtgataatactcagaatgaaggctacagtcacaaagcaaacactgaaaaagttaggaatcaagagcagttaggaaactgttatctatgtcttttaaggagacgagtatttattcaagtagagaaatggagaaataggaccaggaatattttcatccagttttgtgtctcttcttgtgcttatctgggccacatgtttgctagaaaatgaaagaccacccttcactgaattatcacaacacattgcatctcctgctgttgctgtgccatgcttatcaacaaaggtgaaaattagcaataaaattttacctagcagtatttgtgtttagaactttggaaaccagaaaactcccacaagattttctcttaaagttagttatttgattaattttaaggtggcaatgagacttgtttttactttcagctcaatgctttggggctattagagtaagtgaggattcggaaacttttggttattcatattattagcacagatggtcttacctggggccttttctatgaagtcacagccaccaagctgaacatgcatagacaatgattgacaagactgctagttttcattgatgcattgacaaagactttttttctgggtcatccttaaaattagtgggttgtttttgtgatggttaattttgtcaacttgaaatgatctataatcacccaggagacaagactctagtattcccacagggactatccaggttagattaactgaggtgggaaaatctaccctaagtgtgagtagcaccatccaacagcccaaagtcctggactaagaagaggaaaggaagcagaacacaggtatccttctctgtgttacgactgcacacatgtgaccagcagtctcctgatccagtcaccataccttccccgccatgatgaaaggtattgctgaaatagcaagtcaaaattagtccccagggatgtggcttttgtcaggtatgttatcacaggtacaagacaaggagaaaatatgagtttgctctcctactctccacaatagagctgatggatcatatagtataatgggccctcgttgtttcctgattacactgcacccaggactatattcactgattatgtggatggatgtctgtatgtgtgcttgtgatttcttcagtctcattaagcagaatattggttaactatggagccacttttgtatagttagtacttataatggtgtgaagtaaactttacactaaaaaatagcctcagctctcatgatagaacataatatgaagaggttgaaatcatacacacacacacacacacacacacacacacacacacacnnnnnnnnnnatattaccctactgttgagggtatattgagtatagatcactttctttttttaaagaaaaaaagttaaaagtaaaatctggatactgggtactttgagatagaaactaaggaggaaggtaacttctgaagcagaaattccatctcactaccaggaagatccccatgaaaacaaagggagtcaaagatacaggaaactggagaatagttattgtggtctttatttagattacaggactccagagtgtctggtattttattctattgctattggttttatggtttcgccttccttctagggactcatttgttaaagttactgctgcttctcagcagtctacttgcagccttaaagacagaaaggttggaaaaatgggttctgatgcttttgggggatggaccaaatcaaaacctgatttcgactcccagggagacctgtggaagtttttcctctgcttcttcccaggaaagttagttctcagggcttggctatgcagacaactcattctcaggaaagaggtctcaacacttcaatgcaacacgcattgggtcagcagaaactcttctaaaccatttttactaaaatccaagaaaggtatctgtactaccatcttctttttttcaagtcacaagtttctaataaccttcttattattgtatttgaatctaacttcaagatgtggtgtgtgtgtggtgtatgtgtatgtgtttgtggtgtgtgtggtgtgtgtgtggtggtggtggtggtgtgtgtgtgtgtgtgtgtgtgtgtgtgtgtgtgtgtatgtggtattgtggtgtgtgtggtatgtgtgtgtggtgtatgtggtatatgtgtgtggtgtgtgtggtgtatgtggtatatgtgtgtggtgtgtttgtggtatgtgtgtggtgtgtgtgtggtatgtgtgtggtgtgtgtgtggtatgtgtgtggtgtgtgtgtggtgtgtgtgcggtgtgtgtgcggtgtgtggtgtgtgtgtgtgtgtgtggtgtgtggtgtgtgtgtggtgttatatgtgtatgtagtgtatgtgtatggtatgtgtgtatggtgtgtttgagtgaactgtatgtgtgtcgtgtgtgtgtagtgtaagtttctagtgtatgtatgtggtgtgtttgtttggtggtgatgtgtgtggtgtgtgcggtgtgtgcggtgtgtgtttggtgtgtgtgtggtgtgtgtggtgtgtgcggtgtgtgcagtgtgtgtggtgtgtgtgtagtgtgtgtggtgtgtgtggtgtgtgtggtgtatgtgtgtgtgtgtgtggtgtgcgtgtgtgtgcgtgtgtgtgtgtgtgtgtgtgtgtgtgtatgtggtgtatgtggtgtatgtggtgtatgtgtgtgtagtgtgtgtggtgtatgtgtgtgtgtgtgtggtgtgtgcggtgtgtgtggtgtgcgtgtgtgtgtgtgtgtgtgtgtgtgtgtgtgggttttttgggtgttgtatatgtgtgtgtgggtgtggtgtgtgcggtgtgtgtggtgtgtgtggtgtatgtgtgtgtgggtgtggtgtttgtggtgtgtgtggtgtgtgtgtggtgtgtgtgtggtgtgtgtgnnnnnnnnnnnnnnnnnnnnnnnnnnnnnntgggtgtgtgtgtgtgtgtgtgtgtggagtatgtgtgcgcacgtgtgtgaaggtgaaaaggcaataaaaaaaagtcaagtaaaaccagggattcttttccctgatgctgcagcactgaagtgtctggaaggttcttttgtaaaagctatgccttccacaacactattcaggtgggtttcaaatgaggcaaaagctggggctatagcttagtggtacagtgtttgcctggcatgaacaaagctctgggttcaatccctggtgttgtaataaacacataaataaacaaaatgcaggtgtggtctttattttatgagcacctcaaggtccaggaagtggatcagagtaaagagaagctcatttctgagggcctagattctcatcctggtctgcagttgcattgctgtttgttgtttttgcatttgcaagcaggatgactgaatctcagtgtagacaattcagaatagtagattatggaaatcgtaacagttaatacaggtatggaagtctgttttccagacggtctttgtgccctccaccttacttgatttcagagtgatgattgtcagggcagctattgtcacctcggctttccttcccagactctgacaaagctggatgacctcatgtggtccaaggttgaatcccagctcggagatcctcatcctggtcagtttcctttacttcccacagtgcttgccaccccaaatttgtttaggtttccattttaccatttcatttcctctttggaggaatgcttcctcctcactgtgtctcaagaaaaatattgaattttgtttgcattcccctgagttagcatctctgatccagaagaggtgacccagaaagcagcagaactaatccacatttagatagctttgggttttatttctactttccataagctatttatacttctccaagtccagcctcaaagaccaaaatttcaaattgatttttttttttttttacttgatttgtttttctcctgttttgtctctctgcctcacagtagaattcggcttttgtttcagtgtttgctttacaaatatggaccttaaaaagcaagaatttaatcttcatgtttcttctaaaaactagtctcagctcttttggaagatcaaactgaattagatttgagcagcccttacaaagtggggcaatgtcaatatcgttattttctaaggaaagtcgaatcctggaaaagacctcaacatagtgcccagatcacctcatcccgagctctgcttcagccttcactcccccgggggtcacctcaaagcagggagtccagggagtctctcccgagtcttcaatggatgctgttagccaaaaaaagcatgcagggttgatcagtctagaatatgaagacagacttggtggctaaattgtgtagtacatgaattatatctcaataaagttaattttttagaaataaaagagaaaataaaaacagaagccattagaaattttggggagacaggcaagcttcttagtttccctaggagctaattaaatatatcgacatctttaaaaacattcaggaagttccagacaaatatcattcaatttcttaataatatagatgaccctatttactgtgaaaacataggtcaccctgagatagcagccaataacattgaaatttcctgatgtgtttaactttgtaatgaataattaagcagcaaagccagaacactgattattttgtattatattgatatatctagacattcctttatacttgttcaaagaaatacattaagagctggtgagatggctctgtctgtaaagtgcttatgctgcaagccttgaagaacaagttagatctgcttgatcccatgtggaaacaacaacagctgggtgtggcagtgtgcgcctgtaatcccagccctggggaggtggagacagaatgacctctgcctttcattggtcagccagcctagccaaatcagaaagttcaacgattagccctgtctcaaaataaggtggagagtgattgaagaagacacccaacagtgacctttggcctctacatatacatatgtgtgtgaaccacccccacccacatgcatgtatacacatgaacacataaaaagcgatgattgaaataaaaatggttgaataagcttgaaaatgtcgtaccacttcagggcctactatcccgaattagccacaggctcacattgacgcaaagtgaaggacagagttctctgactccctgatgctgtcccattgtcactggatggaatcaaggtctttcggaatggcacagatctccatcaatgtgagcagcctgaggctgtgtgccccgttccatggttctggattctttcctttgcaatgggagttttagagctgtggctcccacaaaggtgcagtttccagtgagcaattctgatggtgtatcttggtgagtgaaaaacatgcagggttatgtaaagttaccatccctgtttgggtgacatgggctccaacagagatgctatataggaggtcaatcttgtgataaaaaacaagccatttaaacagtcagaccttttttttattttacttatttggacttttgtttgtttgtttgttttgaaacagggtttctctgtggttttggagcctgtcctggaactagctcttgtagaccaggctgatcttgaactcacagagatccgcctgcctctgcctcccgagtgctgggattaaaggcgtgtggcactaacacccggccttatttagacttttttactattatcatgtgtgtgggtatacatgtgcctcagcatgcagatggaggtcagagggcaactttgtggagtcagtttgctgggaaccaacatacaagttggtttccaggattgaactcgggttggcaggcttatgtggtgagggcctttgtccaccgagccatctcatcaacgcccatcagtcaacacttcagttaacatttcttttactcttctgactttggaaagcatacaggttaaggggtctgcttcctaaattcacttttgcttgaaagagatttccagggaagatgttggtgaagagttttaaaagcctttaactgaagtagcaccatcagccataaaacccaagaaaaaattgccagtagttagatagcagcaacaaaaaacttcatttaaaaatgtgtgccggaggaagtcactctggggagtgctgtgatctgagagtggattgtgtgtcatcctgaaagactcacagcgtctatatgtatgctaaatgagtgtgaagtgagtgagtggcttcttgggaaggcagcccggaggtacaacttgatgacaagctggcagccagagcaagcaaagggctgactctcagaggggcagagcagagggacggcctcctccttgggaaagctccaagactacaagtcacatgtgcctgacacatgtgaatagacagtgagtgtgctgtcatttgtaacgccagcacttgggagggaaactgaggcacagggatgggtttgggagggaaactgaggcacagggatgggtttttggagggaggctgaggcacaggcatgggtttgggtgggaggctgaggtacaattcaaggccggtatgggcaatatagctagacttctctgtaaaacaaaacaaatggggaaaaaggcaaggctaagaatttgctaaactgaaaaattaaaaggtggtagaagggcagtaaaacacatttttgaggtctgtcgtagcaaactgccacggaggcaaaaatggcctgggaatgagcagccttgggcatacgatcatgaaaatgcataatgtcaaaatgagggatttccctaccccagggagcctccaggtgggctgcaggtgctgtttcagctgcttttgctgtttcccacagcagctctgttgaagccaggagtctgacagtgagcctgggtgtggcccgagcccaggtggtgttgggatggcaataaggttccagggcaagaggtggattgaaggacaggcaggtacaagagtatttgtgagttgtactcagtcgcctgtgagagcccattaccccactatactgagctgagctcactctgcatcctgggagaaaagcgggtgataacaacactatgctaatatgcacctgaaaacagcctgtgggagttccccagtggcttaacacagaggtcagaggcatgcttcatacctagtcaacaagcagtttggagagcctctacacccctcttcgtctgtatccaaggactgtgtagaccactaaggggctggagcaacattgctaactcaggcacagcagtagttaggcttctgtgttatggccacagacataatggtcaggtggtggcctgatgggtcccgtggtatcagtgacagaatctttactgacaaagggtcccagggcccctccaagccagctgtgaagagcaaccagcccttccaataagaccacagtgttagaatagccagctttctttgctactaaagttgcatgtgccccacagcttgatacattgtgtttgaaatttgttcatattgaatagagagccaagcctggccctggtaggccctcctcctccgtgcacactctgcagtgggatgacccagtcccagggtccctgtcatcctccagaactttgtggaacagctctggagatgttggtatcgccctagaaaatgttctgctaaaggtgggggtaaggtattgtgagcagttgtatcctgctgagcaaaattccccagtagcttgtcaggagaactggagtacctgagcaactccaagccttagcatcctttctgctgagggtccagaggcaggaaatctttcggtaccttgacaaagtctcgtttagttggctctgagtgaaaaattcacagtaaatcatgcagtcactgcaaaaactaataatattgaggtccaccaataagcttttaggcaaagcgtcattaactctctaagtctcaggagaggttaagaagaggttttactccatgaaacacaaccccaagttcataggctggagtttaagtcatctgtcaagcaggtcctcatttccacttaatcttatgcaacactcttaaattaaattaaattaaaactaccaattttaccaaatacaatttacaaaatatataaattaagatagtcagtttgtaatgtatgagtttagaaacagatttttcaggtaacagctttgatgtgtaatttcaagattgacactgatctctatgacggttttcttttgtgaaaaagaaaagcctgggctctgacacaaatacttaccattctatagcagggaggttttaggttagggtcatccactcaggtgaggcattctctatcaccttctgttgagtatgattttaaaaatagatggggaaagagagataattattgcccactcattgctattacttaaaatgtatgatttttctagagaagataattagtgtatcttataacttctctattttttggccatagacaactaacctgtagtataagatcatttactgtacacgaggtagatgaatgccgtgggcatctgtgaaaaatgtttcaccgctgtgccttatggtgccaccatctgcccaagaaacagtgtttgctaagaagtgaaactacagtctttctgctgttatgtgaaacatttgttttactttaggggttttgttgtagttttccatgcctgcctttctccttcattggtgtccactcaaacattgttctgtttgaaagagatgccatgagggctgtctctggtataacagtgctggtcctgtcatgctgtcttttaattcccctgatgtggactctcccgtggtgtaaagtttgtttgtccattgtgtcccagcatcccctcagtatggtctcctgtattccatcttagtgactacacaccacatagtagatacttttgatggtcgatcttgtcagctttctgggatttagagttacctaagagacctgcttctgggtgtatctaggaggatattttcagcaaggtttaatggaagtagaaaatcccagagtagatgtaggcagcattatttcatagtctgaataaaaaagagaaagtgaaaagagcacagttcattgtaaaaggagtccttaattggtctagataataaaaagctggagtcagatatagagagaaggaataaaccactgctacaccttgcctccttagtgtctcagcagacaagggagtgatttactatttctccctgcttatatcctgagcccagctacatcacttcctgtctgtctgtacagaccaccagatctctatggttagttaatggcacactctatcctctgacccccagacaggctttatttgtacaagcaaggtattaccacagtccatctcttctgtttcttgactatagatcagtcactggtctacaaagtgaccaactggcccacacctggccacactgggcatactctcaaattgtggaccaaaataaccgtttcctaagttgtttttgccagggattttgtcacgatgagaaaagtaccctagtacagtgctcagttaaacttacaggatgagtgactatagatttttaaaaaatgtatttcatccatttccactttattcttgcattaaggctactgcctcatcagagttctggggcaggaaggggaaagagctcaggcattcacagcactgattttagcaaggtgttctctgtgcgacactcttgcctacacagaggaacgttataggaaagagccgtgtgaatcactcactgtggcttcaggtttggagaagggtcaaggccaccagcaggcacttcactagggaacattttcatatacataccagggcaaaatttctcccttggcttacacatctgatcagttaaatatctttggttgttgtatgtgtatcctggtgaatagctcatacgctgtgttttactgttggctggccttgcatttactcctgacttgtttccctctcagtggttgacttcatgtaacttaataagcatgtagttgctttcactgtaaatgaaaattatagcctccacgcatctgggtgaacacattgcagatgtgagcgccatttccagatgctcctccatttatttcttccgtgtaataccctctctgctgtgcctttcttctaaactctagggttcccccagatataaaccagtgtcccccttcccccaagacctgtctcccacttctgtctttgcccatcagtcatgtattttcacttcctgtttcaagatgactgagctgtgatttaaatttcattaatttttcagcttggcaggcttatctcctgagcaaaactgcccacttctacaagagaaacacaatgcctttggatttttccatagctccccagaaaagtctagaattatgactgcatggaaacctatgtgagtgagaagcaccgggaaaaactggggtctcctgagaaatatggtgatatattatttatgatttattaaagcttgactggggattcagaaagcagtcatctacaagacgtagaagccagacactcacctttaatcccagcagcaagaagctaggaggtggtggtacacacctttaatcctagtactcaggattaagaggtagatggatctctgtgagtccaaggccacccagatctacacaacagtgatccagtcctaaagagtaatagctcacacacagatgatcttagcacctgggatcatacacctttaatccaagaataaggaaggtatataaaataggagcaagatgtcagtatcaggcattcattctccagccaccttgagaataggaacaccccagccttttagaggtaagagctctctgggtagcttggctgctttgcttccctgattttcagcttgaaccccaatatctgtctctggttcttttatttatcttgttacaaagaaaaggtgtgaacggctagaccagacttcatgtaggtcactgtatcagtccaatttctcctgattttgtcagtcctctcagtggttcacagagcaaggggaggtgaacaatagttctgggttctaagttcagccccaggaactaggtatgtgagctttagaaagatgctgatctctcaggatccctttacaaatctaaagaggtgtgtgtgtgtgtgtgtgtgtgtgtgtgtgtgtgtgtgtgtgtgtgtttatgtgtctgtatgtagggggtcagggagctggctgtggtggcaaacacctttcacctcagcacttgggagacagaggcaggcaaatcactgtgagtatgaggccaacctgatctacataatgaattccagaagagccaaggctatatattgagaccctgcctcaaaaacaaaataaaataagtaaacaacattatctctactcttctaattataaaattttatgagttccttatgttatcccttttgtaacaactcaactgtaaccaacgttataatggatagaacagattccagctatgattaatgctatcatctcaatgctataatatattcatatttaaaacagcaatcgtgctttcaataacacccaatttcccaatttatttatttatttatttatttatttatttatttatttatatagactcctctatctcaggctcctggaactctgtagctcagaatggcctcaaattcacagtgatcctcctgcctcagtgtcaggaggatttaacatgagctattatgaaccatgctgcaattacagcatatggcaattgataattcagatgtcaacccaccagaggagtgactctgaggaaggctaatcctgtccagacaaggcctgcaggacattgactctggaaactgctgctcacatctgctgaagcagcgtggtgacttcccaatacctgcacggcagtgtatgatctcatgcgatgtgtatatgtaatctcatgattgtatctagatgtcatgggcacatatatttgtgggtggtcaggaagatgaccttcatttagctatatagaatatgtgctgggacatgcttcataactacatctatttgtcccacgagactgtagacccttaaaagcctcctttgttctttttgctcagactaatatcagaaaataacaaatttcttctcagtctaagacaaactgcacagaattagctcacttttacctcagagcaagttcaaactaaaggctttttgtaaacagatcatacattcaaaactttacagctatgcacaaggtcagagtcacaggggtcttaccaaggttactacacaaagcaccctaagtaaagtatgccaattcttctcttgacagcctgctaacaatagacctgtgtgttatgataaatctttccgccaaaagccacctgagtcctactgccacgtgggtggtttccaccagcagcctgagttctgcccggcgaattagggccccaattaatgcacagagacttatattaggtacaaatgctgcttggctaatgactaagatttatattttataagacttatcttccattggcatcctcccttgccggtgaattacatggcaactctggaggaagagagggcccacttccttcttccattgtttatgtatggctctcactgctaagtcacttcctgcctggatcatcacttctttactacatttcccagaatcctctttgactcctagtcctgtctaacttgatgcctcattggccaaacagtactttattcaataatcaataagatgaacatacacagaagtacattccccatcatctatgtctcaaagtttgtcactggtcactgtgttcctccttctcccctcaatctggtcatgatcttactcctggaaccttggaaccttgtgttgccaagacaatgacttggcaccttactgttttaccctaggaatgtgcttttgaccaatgagaggtaactcttgtaattttttaaaatctcttcaaggctcctgtgaaaaacagagtttttagactagaggagaagctaggaggaattagaattaggacaggggaattagaacagaaacagcaaaataaagagacttgtttgcaatagcacagtgtgtgaaagtgcatgttcaccctcagatactctaagaagaaaaaagttccttttacttgctgttgcattgcctttgaaccctgaagagagtcttggtgttggacccctgaagactcttgttacctcagctttttgagagctgggatatgcttgtaccatcgtgcctggctgtgaactttttaaatttcagcacaaagttaaaatttaccttttgagtaattctgattgaaaagctattatttaaaaatatttaagatgatcactggccctgaagccaaatgtcgtatctttccactcatctttgctattgaccattctcatagaagatagttgttttctcttatgtttaaaaaggtgacaggcatcccattttagaatcaatagttaaaatttaatttgagtgaacctcgaggttatcttgatatgaaattgtttcatttcagatatttgaaactgtaagcagttttaaagaaaaagtattagcgagattctggtttttgctctatctagaggttgcatcccttgccagtatttcttacattaaacacaactctaagatgctatgagacttgagaaataaattggaagtttgaaagattagttcttgagcttttggggcaattgattttggcatggaaggaaagagttgatagtgagcacaactatgtccggaatgcctgtctctttgattttcatattttaaattctagtggtaactagagaatattcctgtggtggtgactttgagtgtatctcccccaagaggctcatgcattgaagacctagccctcagtgcaagccgccttcagaggtggggtagcgggggaatcacgagggctctgggattaatctgttgatggagatactatttgaatggactgttgggaggtgtggcctggttggaggaagtgggtcactggggtgtgtcttgaggggggtggatgtccttccctgtgccttcttattgtgaactctttgcttcctggatcctctgaagtaaatagcccaccattctgtcttctctacttgtggttacacccatacacaactcaggtccacagtagcagagccagcctgcttccaactaaatcctgtgacacctgagccaaaataatggtttcctcccttgagctatttattgaccatatcttgtcatagcacaattcccatttccattcagaacccagagaatttgttcatgggttcagaacctgtggctcaatggtcttgcagcaaacgacaccactttgttatgccaatcccctgagctgtgtgaggtccacttttataaaccttcatcggttggtcacaacttgtgaaaccctatgccaaccccatcttttctcagtgacacatctatgcacatggcagcccatgtttattgcagaggtacacacctggtgaagggcaggtacaatgattctaaagacagcagctattatcttgctttcttcaactcaaccgcctacagatgtaggcatccagaggaaaatatccagtacctgattgaacacattcttttggtgagcaattgaatgactaggaagtacttccctgtacccacgaaactgaaatttgtctcctgccaagctgaactcaattggccctgccctccttccacccgagagcctgtttagaacagggccacaggcatcacatcccatcctctgtgttccatttccatatggttgtcttttgggtaaccatgctttgcctagcctgcagatctaatatctccccatgggatctggaggagaaactgcattttgaaatggactccttaagtgcaagaagaaagaacacttccttgcctgtggctgggatgatctttggcatccagaacagccccttgaacaaatacatcattcccaacacaaacctctctgtttcttgttgaaggtagtctgtgtataacaaaacccacaaagcacactgtcaagtagcagttgtttccttgtgatcacaggtgtgataggcagctgtcacccatatcacagcctagtgtggtggtttaaatgacaatggcgactaggctcatatatttgaatactcagtctccagttggtggaattgtttaggaaggattaggaggtgtggtcttgttggagaaggtatgtcactaggggtcagctttgaggtttcaaaagttattgccattcctgatgcttgtggatcaaatgttttaaactctctcagttactgctctagttccatgactgcctgcctgctgccttgcttcctgccatgatggtcatggattctaacctttggaactttgatccacaaatgaaacactttttttataagttgccttgatcatggtggtttgacacagcaattgaaaagtagctaagacatctggtgtcacaggaatgtattgcatatcacactagccctagaaaagatcaaaattctaaatacagttttgaagaaatacaaattgcttttgtgacatctttgcatgtgttctcatccatgtgtgagcagctgagagtgcagataggtgagcatgtatgtgtgtgctcatgtacatggagtcagaggtcaactttgggttttgttccctaggcaccatttatattgtatttttgagacagggtctctcattggccaagtaggctaggctcactgttcagtgagacccagagatccgcttgtctctgcctccacattctttggatggtaaattccgtggctggtttgttctgtgagttctggggaatcaaactcaataaggcataggtgccttattgtaaggcatgcactttactaagtcaccccaaccctgttctgtgtgatctgtgtgacagagagaccattgtttgaggcctgtcccattccctgaaacagagaccgtttgcttctannnnnnnnnnnnnnnnnnnnnnnnnnnnnnnnnnnnnnnnnnnnnnnnnnnnnnnnnnnnnnnnnnnnnnnnnnnnnnnnnnnnnnnnnnnnnnnnnnnnnnnnnnnnnnagggggtgggtgggggggggggggggtctctagaatcttttcttcaagctgagctcagttttaatccagagacaactaactgtgggcttccctttattaccacctcacagttcttctgtctatggtgatacttgacatttttgtgtggcacctgactgaaaccatttcccaggtctaagttaatgaggctgtaaaaatatgactaatttggaataattatcttagtgaccaaaaaagcagaagttgccaacatttcttctactactgaccatttatgtctatatagcatctctgtccattttcacttctgttatttgtttttggtgtgtgtgtgtgtgtgtgtgtgtgtgtgtgtgtgtgtgacctgtatggatttcttatgtaccatggatgttaattcatcatcagttgtgtatcccagtgtatttttttggaagcacaggctgaattctcattttcttggttgttctctctactgttcacatctgaactgaatcttgcacagagagtccagtcttcctgtatggggattgataggttagtagattttttttaaggtggtcctgttaagatccctatgcctggttatacaagtgaacactaatctaagtactgcttctatgaaggtctttgcaggttgaattaaagtcccaaaccaattcaccttaaactatagaggttgctggggtgaacttgggtacatcttgagagagctttaaccaggcagaagagaaaggagtagtctgaaggagacaacaggtgaaaatgagtctgttggtttgaagacagcggaatgataaggaatgtggagagtctacagggggaacgctcccatctattattaacaaggacgtgaggacattgtccctcaccaaccccaagttagaaaatgcctgtccagcactttgacttttgtcttgtgagacactaccaagaaaatccactgtagcctcagaattctgacccacagaactgtacctggataaatgaatgttgttttgaggcactagttatggtaattagttacagtgtggtataaaatgatattctagtcacatgctcatgtcagatgcttacacgtgtctatcctctcctgtttaattgctatcttagaaaatgttgcacacacttctatgttactttagcgtctttgtgcatgccatcttaagagctaactagtaggtctgaaatgggtgggttagagggtatttagtaaatacccattgctgatcatttggttcctttctggtttgaatactttatttcgtttttatttgtgtgtgtgtgtgtgtgtgtgtgtgtgtgtgtgtgttagtgtacacgtgtgtatgggtccaaccgaaaccagaagagatcatcaaatccttggagctcagagctgcaggcagtcatgagctacctgatgtgctgggaagtgaactctggtcttctggaagaacagcaactgctcttaaccaatgagtggtctttctaggtatttttctctattttatgagaaaaagaatatctttgtgtatctgacttcctaaggatagactgtggtggtagtcaagacggattcagaaggtagaaatgcacaaggtattcatggtcacgtggtccattctgtgattttccaactggatgtagccttctctggagacattcaggcctatatagttactacgtctggagatggagatcaaatggagtgaaggcacaagtctgcagaagtgggaagctgcaaacaaatgcaaaatacagcaagttgttgtttttattttatcccctttccatatttcctgacaatgctgttgtcccttgggtgtaggctcacaccatattttctttctttggctgttatttaatgatattgggcatttcttctttgaaatgatatttctctgtttgtcacagtttggtattgatgacaccatccttgctgctaagaaaacatgaggttataaaagagacatttgctaagtagggggacatcagagtgccagatcatcttctgtatacaaaagatgaatcaggagtgtaaatgagtgagtgagtctctttaaatgtctatgcagctaggagagagagagagagagagagagagagagagagagagagagagtgattctgtggtgcaagcatagaggataaaggtttcacaactgttacagcttttgaattagtgagtcttgaataacatgtatcttaaagagataaccggaacagatctaaatctctcttagtatttttatacaagatacttttctctgggttatgggcaaatatctgacaataggcagctacagggaggagggtttatttgggctcacagtctctggaaggtgccatctgtcatggtgggaagtgtgtgaggcagcttctgactttgcactcagtcaataaacagagtgtgggggatgggcagtctaacctcaaggcacacttcagtgacccacagcctacagcaaggctctaccttctgaaggcagacagccttcccacacaacacctccaggggagccaagtgttcacagacattagctttgaggacagttcacacacattagcctgtggggccaagtattcacacacattagctttggagtcaattcatattcaaaccacccagtcctcccttagttttttttggtatgcatggtaacttagaaaaacagggatttattttgttacctcaggaggccaacaatcagatatatagagctggcagagcatattctctgtggatagaacattccaaactcatccagcttctggtggatctggtgttgctggcttcccctttgtaacaaattcactctagtctgccttcatctctaccctgcttctcctctgagcctttctgttctttcctctgtttgataaagacattggatgtataacaggatgacctcgccatgaattctttaaccaattatatctgcacagatccttgttccaaataaggcatatattcaaagaccccagggacttaaaagtagacacaactttgtgggtctaaaacatcagtttgctatagtccttaatttactataagtctcctactggtaattgttcataaggtataatttatgactcattatcaactagtttgaaaatatttttagagtgtggctaagcacatgattatgatagacagcagctttgcttgatggtacaagagtccagctccctctccttcatctacatgggtgtggaatgccacagtcaccctctgtgcagtgcaataaacatatattggagattgcccactccaaaaaacacaagcacagacatgtggtatatcatttgtacatttccatacatacctctgtaggattatagtctctttattcaaaaagacaccaaggcaagatacaggccagagctaggttatagaacccagcaagcgcggccagaacaaaagggggccagggtccacacgtgcagccccttaagaagctcccttacgtcaccccggctttccttcaccacgcccttatgggcgagtcccgggtccacctggtacctgtcccaggactattgggcggggctagggtgtcttcctatatacctcctccaatatggctgcccatgtgtatctcctcctgcatggctaacttacacctcaccactgatacaaatttggaggacatgactgttgcatccagcaaacttctacccagggaggaacaatacctcctcaaaaccattccctatgtcacttgcattttattttactgcagatttttttatttggtttagaaacaagagtgttttacatgacaatcccagttcccttctcccttcagtccttctcttcccccctgcccccaactaaaaccctacctatcacatatcctttctgctccccctggatggtgaggccttccatagggtgtcatcagagtctatcatatcctttgggaaaggggctaggcccaccccgtgtgtcttggttcagggagtattcctctatgtggaatgggctccnnnnnnnnnnnnnnnnnnnnnnnnnnnnnnnnnnnnnnnnnnnnnnnnnnnnnnnnnnnnnnnnnnnnnnnnnnnnnnnnnnnnnnnnnnnnnnnnnnnnnnnnnnnnnnnnnnnnnnnnnnnnnnnnnnnnnnnnnnnnnnnnnnnnnnnnnnnnnnnnnnnnnnnnnnnnnnnnnnnnnnnnnnnnnnnnnnnnnnnnnnnnnnnnnnnnnnnnnnnnnnnnnnnnnnnnnnnnnnnnnnnnnnnnnnnnnnnnnnnnnnnnnnnnnnnnnnnnnnnnnnnnnnnnnnnnnnnnnnnnnnnnnnnnnnnnnnnnnnnnnnnnnnnnnnnnnnnnnnnnnnnnnnnnnnnnnnnnnnnnnnnnnnnnnnnnnnnnnnnnnnnnnnnnnnnnnnnnnnnnnnnnnnnnnnnnnnnnnnnnnnnnnnnnnnnnnnnnnnnnnnnnnnnnnnnnnnnnnnnnnnnnnnnnnnnnnnnnnnnnnnnnnnnnnnnnnnnnnnnnnnnnnnnnnnnnnnnnnnnnnnnnnnnnnnnnnnnnnnnnnnnntatattttggagatcagccctctgttagatgtggggttggtgaatatcttttcccagtctgtgggctcctgttttgtcttgctgactgtgtcctttgccttatagaagcttctcagtttcaggaggtcccatttatcaattgttgatctcagtgtctgtgctactggtgtaatgttcaggaatcggtctcctgtaccaattaattcaagggtattttccaccttttcttctaataggttcagtgtggctggatttatgttgaggtctttgatccattttgacttaagttttgtgcatggcaataggcttggatctacctgcagtcgtctacatgtctgcatccagttatgccagcaccatttgttgaagatgttctctttgttccatcgtataaaatttggattgtttgtcaaaaatcaggtgtttttaggtgtgagagttaatatcagggttttcaactctattccgttggtctacctgtctatttttgtgccaattccaagctgttttcaggcctataggtctgtaatagtgcttgaaatcagagatggtgatgtctccagaagttcctttattgtacagggttgttttggctatctggggttttttgtttttccacatgaagttgagtattattctttcaaggtctgtgaagaattgtgttggaattttgatgggaattgcattgaatctgtagattgcttttggcaagattgctatnnnnnnnnnnnnnnnnnnnnnnnnnnnnnnnnnnnnnnnnnnnnnnnnnnnnnnnnnnnnnnnnnnnnnnnnnnnnnnnnnnnnnnnnnnnnnnnnnnnnnnnnnnnnnnnnnnnnnnnnnnnnnnnnnnnnnnnnnnnnnnnnnnnnnnnnnnnnnnnnnnnnnnnnnnnnnnnnnnnnnnnnnnnnnnnnnnnnnnnnnnnnnnnnnnnnnnnnnnnnnnnnnnnnnnnnnnnnnnnnnnnnnnnnnnnnnnnnnnnnnnnnnnnnnnnnnnnnnnnnnnnnnnnnnnnnnnnnnnnnnnnnnnnnnnnnnnnnnnnnnnnnnnnnnnnnnnnnnnnnnnnnnnnnnnnnnnnnnnnnnnnnnnnnnnnnnnnnnnnnnnnnnnnnnnnnnnnnnnnnnnnnnnnnnnnnnnnnnnnnnnnnnnnnnnnnnnnnnnnnnnnnnnnnnnnnnnnnnnnnnnnnnnnnnnnnnnnnnnnnnnnnnnnnnnnnnnnnnnnnnnnnnnnnnnnnnnnnnnnnnnnnnnnnnnnnnnnnnnnnnnnnnnnnnnnnnnnnnnnnnnnnnnnnnnnnnnnnnnnnnnnnnnnnnnnnnnnnnnnnnnnnnnnnnnnnnnnnnnnnnnnnnnnnnnnnnnnnnnnnnnnnnnnnnnnnnnnnnnnnnnnnnnnnnnnnnnnnnnnnnnnnnnnnnnnnnnnnnnnnnnnnnnnnnnnnnnnnnnnnnnnnnnnnnnnnnnnnnnnnnnnnnnnnnnnnnnnnnnnnnnnnnnnnnnnnnnnnnnnnnnnnnnnnnnnnnnnnnnnnnnnnnnnnnnnnnnnnnnnnnnnnnnnnnnnnnnnnnnnnnnnnnnnnnnnnnnnnnnnnnnnnnnnnnnnnnnnnnnnnnnnnnnnnnnnnnnnnnnnnnnnnnnnnnnnnnnnnnnnnnnnnnnnnnnnnnnnnnnnnnnnnnnnnnnnnnnnnnnnnnnnnnnnnnnnnnnnnnnnnnnnnnnnnnnnnnnnnnnnnnnnnnnnnnnnnnnnnnnnnnnnnnnnnnnnnnnnnnnnnnnnnnnnnnnnnnnnnnnnnnnnnnnnnnnnnnnnnnnnnnnnnnnnnnnnnnnnnnnnnnnnnnnnnnnnnnnnnnnnnnnnnnnnnnnnnnnnnnnnnnnnnnnnnnnnnnnnnnnnnnnnnnnnnnnnnnnnnnnnnnnnnnnnnnnnnnnnnnnnnnnnnnnnnnnnnnnnnnnnnnnnnnnnnnnnnnnnnnnnnnnnnnnnnnnnnnnnnnnnnnnnnnnnnnnnnnnnnnnnnnnnnnnnnnnnnnnnnnnnnnnnnnnnnnnnnnnnnnnnnnnnnnnnnnnnnnnnnnnnnnnnnnnnnnnnnnnnnnnnnnnnnnnnnnnnnnnnnnnnnnnnnnnnnnnnnnnnnnnnnnnnnnnnnnnnnnnnnnnnnnnnnnnnnnnnnnnnnnnnnnnnnnnnnnnnnnnnnnnnnnnnnnnnnnnnnnnnnnnnnnnnnnnnnnnnnnnnnnnnnnnnnnnnnnnnnnnnnnnnnnnnnnnnnnnnnnnnnnnnnnnnnnnnnnnnnnnnngaattgtgcaattgggtgttacttaatttccatgagtttgtaggttttgtgtaattcatgttgttgaattctaactttaaagcatggtggtctgataagatacagggggttatttcaattttttttgtatctgttgaggtttgctatgttgccaagtatgtggtcgattttagagaaggttccatgtggcactgagaagaaggtaaattgatttgtatttggatggaatgttctatagatatctgtgaagtccaattgcaccataactttgattagttcctttgtttctttgttacgtttctgtctggtattcctgtccagtggtgagagtggggtgttgaaatctcccactataagtgtgtgcggttttatgtgtgatttgagttttagtaatgtttcttttacaaatgttgatgcctttgtatttgggtcataaatgttcagaatttagacctcatcctgatggatttctcctgtgatgagtaggaagtgaccttcttcatctctcttggttcattttagtttaaagaccaatttgttggatattaggattgctacccctgcttgtttcttgggtccatttgattggaaaatcttttcccaaccattaattcttgggtatcttctgtctttgagattgaggtgtgtttcttgtatgcagcagaaagatggattctgtcttcttatccattctgctaatcttgtctttttatagtcgagttaagaccattaatgctgagggatattaatgaccattgattgttcattcttgtttgtttttgatttggtgatggtgatgaaattatatgtaggattctctccctttttccttttggctgttggtaaagtgggattatctattgcctatggttatagttaacttccttgggttgcagttttccttccagaactttctctatggctggattggtggatatgattgtttgaatctggttttgtcatggaatatcttgtaatctataatgattgaaaactttgctgggtatagtagtctgggttggcatttatggtctcttagtctaggtagaatatctatccaggaccttctggctttcagagtttccannnnnnnnnnnnnnnnnnnnnnnnnnnnnnnnnnnnnnnnnnnnnnnnnnnnnnnnnnnnnnnnnnnnnnnnnnnnnnnnnnnnnnnnnnnnnnnnnnnnnnnnnnnnnnnnnnnnnnnnnnnnnnnnnnnnnnnnnnnnnnnnnnnnnnnnnnnnnnnnnnnnnnnnnnnnnnnnnnnnnnnnnngtatgtctttctttaggttgtgaaagttttcttctatgattttgttgaatatgttttctgcgcctttgagttggatttcttcaccttcttctatacctattattcgtaggttttatcttttcagtatcccatatttcctggatattttgtgctagggattttgttggaccatattttctttggttgatgagtctatttctcctagtgtatcttcaactcctgaaattctctcttccatctcttgtatttttttggttactcttgcatctgtatttcctgatcctttacccagcttttctatttccagcattccctcagtttgttttttctttattgtctctatttcagttttcatgtcttgaatgttttccttcattgtttgattatttttttcttggctgtccttgctttctttaagagatttgttgattccttgcatttttggtgtaattttcttacacttctttaaggggttttcttatatcctatttgagagcctctatcattttcatgaagttgtttttaaggtcattttcttctgcttcatctgtgttattctgttcagtttgtgctggtatagagcctctagactctggttgtctcatattggttttactgttgttggatatgtttttatattgtcttcttccggtttcgtctttgggtggctgtagaaggactctcccttctggtagttgcaaacaggtccaatactcttatgtctctcctcttcctgtgaatacactgttaccagggccttggcagtgtcggggtctgttggatcctgctgccaagttcggatctgttgagcagacccttggcatcagatgtttcctgtcacttgcattttaaataaggtaaagtgcatggatttgatattttccttgggaatccataaagtctgtggagaccacaaatgcagttcaaagacatccaacttactaaatcaaatggaagagtaagtaactgcacgaaattaaacttcagtgccccgtcccctacattcgatgatctaggcagttttttagttgtgtctcaggcttcttaattatctcttctctgaaacttatgtaggaccatgtgctcaaaactgtaaagctgaaaatcccacatcccagactctccacaatcttggacaaattgggacccaggactttggtttccccagagactgatggggctctggtagaaagatatagcaagaccatacctgcagccctaaagaattcacattctctgagatggcttatgcctatcctatgtgaatttattcatgttcccagcttcatcttaccaccatctcagaagcttgtggcttctgacccaggtgagcccatgctctggcctattcttgtaagcagctgcacctggagttggctgtttgcctcatgatttcaggtatccaatgcatccaagaaaacatctaatttgcagttttcccagatgttattttttttttcactgtaagaatgagagccgtggcctcttacctcaatacatcttccatctgaaacaagaagttgtcgtaagcattttaatatccacaactgaaacaaataaatgtgggtaggagtggtaggtctgtctgcatggttgatcgtgacatgggcatccagcacatttagtgcatcaatgtctggcatacagatgagtgtgtgtttggacattcatgggatctgctagcagtgtttgcaatgtgatcaggtatgtatttggtacttcgaggtactggggacagaatgaacactgggatgggagaaggagctgcttggtgaggggccaggtggcacataaccagggcaaatgcatgactccacatctcctggattttagatatgtcacctgacttgcctggaaagtctgagccacccttctctgggggtgggaagctataactgtcaaggtggcttcatttctcaatgagttaagggtaataatcaggcttgggtagttacaccattgacaccattgtgtgtattctatacacctgccaactaagcacaggaatgagcccattgctgatacttcagccagatccctgtgatctagtcagctttctttctgccttaacttccaacttctggagtcactttgtgctgttaaaaaacaaaacaaggtctggggtgtagctcattgtaaagcctccaaggacaaagggttcaaccccagcactgaaagcacacaaatgaaaaacaggcatggtggctcacacctgtaatgccagcacttacaagcctggggcagaaggattgccatgagtctaaagccatgggactacatagtgaggtgcaggccagcctgagccatagtatgaaactctgtctaaaaacaaaacaaacaaaaaaacctacaaagactacagagaaagaaaaggcaggataaacccttgtgtttcttcacacacaagatagaaacaaaaagagcctttttaataaagcttttgcaatatacgtgtttaatagaatcaaaactaagtttgcaaatgaaaattagtactttatttgtctttatatatatttatgtagtaaaatctaagctttttggcatgtttatggaataaatcttctgataattgatattatttacttctctaaatgagccattaaaaaaaccctttaatttgggatttacagtgttctaccttttgctcaaaccagctgctctttttcttgccctccccctaccagtcatccctgaaggacctctgctacacctgaacctctgcctgagaggtgatgacattgccaaatccatacacagagatgtggttggagttcccacaccaattcttgtctccaaaagagagacactattaggaggtatggttgtgttggaggaagtaggtcattgtggagacaggctttgaggtagcatgtatgctaaagtcatgcccagtgtctcagattacttcctgtggcctgtgagtcaagatgtaagaactctcagctccttctctggcactgtgtctgcctgtgtgccaccatgccacaccatgaaaataatggactaagcctctgaaactgtaagccaccacaattaaatgttatcctttgtaggagtagccatggtcattctgtctcttcacagcaatagaaaccctaactagaacaaaagttggtaccagggactagggcactgttgtgatagacctgaccattttgttttaaagaaatatggaccttggggctgttgattagaaaagccgtcaaacatttcaagagctgcttaatgggccatactagtaggaacatggaagacagtggtgctgagtgcgatttgaactgtgggggtgcctagctcaaaaattttcacagaagaatttttaacatgttgctatagatcattcttgtgttattttgatgaagaaggtggctgtatttttgctcttgtccaaaatgtctgcttgagaagagatttaggttaatcccattggcaaaggaaatctcaaaacagcctagtatatatatactttgtcatgtggctattagtggtaactctaatgaagattcataatgacagggagaaagaaaatgcaaaacttgaggagaaaaggaaaatcaggaagtggaatggaattaacgtctgtgttcagggatataaacattaagaaatggaataaaggggggtggtggcctcagggcaagatcccacccagccaagtttccaatttgtgaaaaggaactaaataaaagcttagagctgtagtgtgtggtggcacacaccttaatcccagaactctagaggcaaatctctgagttcgaggccagcctggtctacacagcaagttccagaacagccaagtttaggcagtgaaggttatcattgaaaacagaaagctggtgaagatgtaattaaacaaggggggtgggtatgttccagcacccccaagcagcagaacttggcagctttggccatgtggttctgtatttaaagttaagtacagaataaagaggttagggaatatttctccgcagctagggaaaagcactgaagaaagacatgtgtcaggggtgtccctgaatagaggccttctagagaggccattgcctgaagctgtgaagttgaagcctggattgccttggagactccaagatgttagagatgccagagtcgtgggatgcctgtgaggagagctgctaacagggagtagaaccagcccaagagagggaagtgtgttgcagtcaccaggagctggggaatctgaagagcacttgatgtcagacatggagacacagtgtggagtttgcccagctggtttacagtcttgctttggtccagtattccctcactatgctcccttccctatgttttggaatggtaatgtatatcctgtgccattatatgctggcagtatgtgatctactttttgagattttgattttacagaggattacagttaagagagttagagaatctcaaaagagactttcaattttagacttttagatacgtttgagactgttatagactatggggacttttgaagttagaaagaatgcatttttgcattatgatatggctacaacaagcctttgggggccagggagtggaatgtggtggtttgaaagaaatgccccccaaaggagtgtcacaactaggaggtgtggctttgttggagtaggtgtgcccttgttggaggaagtgtgtcactgtggaggtgggctttgaggtctcatatgtgctcaagccacacccagtgacacagaccaattcctgttgcctgtgagtcaatatgtaagaactcttagttccctccccagtgtcatgtctgcctgcatgctgccatttttctcactatgaagataatggactaaacctctgaactataaacctgctcaattaaatgtttttctttataagagttgccatggccatggtgtctcttcccagcaatagaaaccctaaataaggcaacaaccttcatttctcagtgcttcctgatctcaatgtgaccacccacataagattcccattgtcacctcttcctgtcaattgcatgctcaactaaccctttcttcgctcatggcagctatctggtcataacagcaaatcctgatatgtgcagtcacagatgtttaaatggcatgtgtattatgctagtatttttgagtataaaggaaaatatctgtgagaggattcttagaagtgaagtgctcctgctcaagctggggacaagtcaccccaattttctgaaattggacagtgttgtagacattgacggttctttattcactgcatggactttcacaagtcattcctattttggtgatggtggtctagagtggaggaagatttcaggctatgaccagcctacaagagacactcctgatgcttcctccccccaaaccataagtcctaacaaaccctctttccttaaactgattttgtaacagcaacaagaaaatgaatcagcagaaacaccctttgtatgggtagggaaactgacgtgttgctatatacatttgtctaaacaaaaatgttctagggttcataggcagttggtagttggtgggggagaggggagtatgttcttcgttggtaggcaaggcactggctagttgtcttccctcctataaacccttactcctgtaagaaacaacacagaattcattggtcacacaagcatgcacacagacacagacagacagacagacagacagacagacagacagacacacacacacacacacacacacacacacacacacaccacacataccccacactacactacacgagacacgaaagtaaaaggagacctgactagttgggagtaaaggcaagcaagcatagccatacacattatatacatgtgcaaaaacgtctcagtgaaacccattgtcctgtataattaatatatgctaataaaaacattgaaaatattctagtaattaaaactcttgccagtgaagtcagctccctttgggcatgaagagccttgatctgctcatagatttgtataaaaaggttgaatcacagggtcagcagtattgccaaagcctgtctgcattgagaattgaactggaggaggcagctgcttgaagactccatggtaataagaaatttttattacaaaccccatttatgctgaaaaccacagttttcttataggtcaacaccagtggggaatgatgcacggtaatagaaaatacctggattccctgcaggcatcttcagcctcttttcttcctcgaggttggctctgcagggaaattacacctttctcttccttccactttggatcaggtgtgaacaagatttcagaaaataacaggaaggggtcatctgggctggtcctgcgtggttccctggggatgagtgtggcttactccatccaagccttatgtgtaaggaaagtgccttccctgttggttagttctatgacaccgagataaatatggtagtctgcagagcagttgtggaggtaggctgcgaagaagcaccactctgcgtgggcgactccagcacacggtgggttgggaagacgatattgctatacagctgtagctttccaagctattcttgtgtctttcttctccccagggctcaaatagctgtgggttatttgtcctttgagatatatgaagatgaaaacgagatgcataaaatgtgaatcaggccttgtggtggtggtgcacgcctttaatcccagtactcaggaggcagaggcaggccgatctctgtgagtttgagatcagcttggtctacaagagctagatccaggacagcctccaaagccacagagaaaccctacattgaaaaacaaaataaaacaaaacaaacaaacaaaaaaaaagtgaaccagtgttgtctacactctgtgtgcaacagcatggatctacttttctggcttttttgtttgtttgtttgttttgcagattttttaaattgaattagaaacaagattgttttacatgacaatcccagttcccttctccctccagtccttccctcaccccctccactcaattaaaaccctacctatcnnnnnnnnnnnnnnnnnnnnnnnnnnnnnnnnnnnnnnnnnnnnnnnnnnnnnnnnnnnnnnnnnnnnnnnnnnnnnnnnnnnnnnnnnnnnnnnnnnnnnnnnnnnnnnnnnnnnnnnnnnnnnnnnnnnnnnnnnnnnnnnnnnnnnnnnnnnnnnnnnnnnnnnnnnnnnnnnnnnnnnnnnnnnnnnnnnnnnnnnnnnnnnnnnnnnnnnnnnnnnnnnnnnnnnnnnnnnnnnnnnnnnnnnnnnnnnnnnnnnnnnnnnnnnnnnnnnnnnnnnnnnnnnnnnnnnnnnnnnnnnnnnnnnnnnnnnnnnnnnnnnnnnnnnnnnnnnnnnnnnnnnnnnnnnnnnnnnnnnnnnnnnnnnnnnnnnnnnnnnnnnnnnnnnnnnnnnnnnnnnnnnnnnnnnnnnnnnnnnnnnnnnnnnnnnnnnnnnnnnnnnnnnnnnnnnnnnnnnnnnnnnnnnnnnnnnnnnnnnnnnnnnnnnnnnnnnnnnnnnnnnnnnnnnnnnnnnnnnnnnnnnnnnnnnnnnnnnnnnnnnnnnnnnnnnnnnnnnnnnnnnnnnnnnnnnnnnnnnnnnnnnnnnnnnnnnnnnnnnnnnnnnnnnnnnnnnnnnnnnnnnnnnnnnnnnnnnnnnnnnnnnnnnnnnnnnnnnnnnnnnnnnnnnnnnnnnnnnnnnnnnnnnnnnnnagttgttttgatttgcatttccctgttggctaaggatgttgaacactttcttacgtgtctttcagccattttagattcctttattgagaacgtctatttagttctgcaccccactttttttattggattgtttggtgttttggagactagcttcttgagttctttgtatattttggagatcagccctctgtcagatgtggggttggtgaatatcnnnnnnnnnnnnnnnnnnnnnnnnnnnnnnnnnnnnnnnnnnnnnnnnnnnnnnnnnnnnnnnnnnnnnnnnnnnnnnnnnnnnnnnnnnnnnnnnnnnnnnnnnntcaaaatcccaacccaattcttcacagacctggaaagaataattctcaactctatatggagaaacaaaagacccaggatagtcacaacaaccctgtacaataaaggaacttctggaggcgtcaccatccctgatttcaagctctattacagacctaaaggcctgaaaacagcttggaattggcacaaaaatagacaggtagaccaatggaatacagttgaaaaccctgatattaacctgacacttatgaatgcctgatttttgtcaaacaatccaaatttatacgatggaacaaagagaacatcttcaacaaatggtgctggcataactggttgcagacatgtagaagactgcagatagacagcctatcgccatgcacaaaatttaagtcaaaatggatcaaagacctcaacataaatccagccacactgaacctattagaagaaaaagtgggaaatccctttgaattatctggctttgttcttaaagtttgtgtaaatcagctgtgctcttaaagagagccatacatgcttatggaaagtgtcctttgacattgatttagaacctttttctgtgaactaagatcctgtccgagcatgggttctcacatgaggttgtgtcacacagggaacattagtgccccttggtgcctgataaacagcataggtcacacctagttcattgtttatggatctgtgtttcatcttcagagactccaaagatggatgatggattttcagaaagctgtcacagatttaacacacacagctacactagtgtgtacctgtgaaatcaccctggtaatccctcagccctgtgcatcatatctggaacttagaatggtagtttattaggtcaggggattgccaggaaggggacaaggccacaccttcccccttacgccaagatatcagggaggaaaatgcttcccgagtcacagcacagtaagcatgagactgctgtctgctcttttcactaaaaatagttgcagtttcatttaagaagtcacactgctattaggcttggttatcaacttaattatcaaagtgcatctctgagtgtttgtgatggtgtttttgaggattaactaaacaggaagaccctcctgaatatgggcacaacacccacaggttggggacccagacagaatgctgacaccaggaacaggtgggctttgctcctagacagatgagcagcctcagatgtgtgatggctctgtgtgctcacagctgggggttagatgaggtcaaagcatttcctcctctgcacagttgtggggagcattttgttaagtttaccaggcttgaagaagtcagagtcaggccattgtctatcctctggagtacattattgattgcagaggctgcctatctgacagttttgagacatgcacctggagcttttgtaatgctttgctataaaacaaacactttattagattttactccataggtcccgacagctgtcatgtaagctgagccactcactggggctctggagattagggaatttgtgtaagctcatacaaatggccactggagagaattccacaagtttctctttccagccatctcagagcatacaggacacgggaagccaagcttacagggctcagtatgactgtcctggaataccagagctgttgcttcaaagtgaatgtgccagttgctgattgtgatctcagggagggaggagtgggactggggaccgacagccgttcacaatctactgaagtcacagcgtcattcctatggtgcaggtgcagctctctggccatggcatcaatggacctggagaataggagccctagattaggaaggaaaactttctcagcacccccaaccccaattcttggtatatgattccatagtaaatgagggtctaaatgctgtctattttgttgttgttgttgggttttttttttttttttgcctcttcttgctgttcttcactatttttaaatggtccatcttaagggttcctagtcaatgttcacgagctgctgttgttcatagtatctcatgagattcagacaatttcagtgttgttcgatgtacttttctcatcactggcccaccatttgaggtccttcatggcagaggaggcatggcggtgggaatggaaggtacctggtcacatggcatctgcaagcaggaagcaaagaggtgaatgggctgctcagcttactcctactgtcccccttttatcagtctgggatcccatgggatggtgccagccacattcaggtcagcctcttaagctgggtgtggcccctaagtgattctaagtccattcaggcaaactatgtagaagaacaacgataaacatttcattcaggaacttgtggacatggagtgagctggaggaaatatggaggagctgttgatactacgcacatagtgggtcagattattttcttttgcaatatgtgattgtagcaaacatcctttggaagagagaataggtgaagaatgataaattgtgtctctgtgtatggctggagtgcttttccccctcactcctttcgggtgatttaggaacgcagtaccaaagtttgtttgcgtgaccttacctcccttctaatgccactaacaaagcctcctctgcactttgtaatacaaataaagacatgcagatgtcataggtctattctttggaccaccagctccgaaataacgacacatagactttttattaattatggaagcctggccttaacttcttaggcttgttcccagctagctcttaaaacataagttaacctgctgacattaatctacattctgccacatggttcgttacctctcctcagtactgtaggtccaacttactgcgagtctggctggcgaatctgccacctcagattctttccctgagttcctatctctccctggaagtcctgcctatcctctcctgcctagctattggccatccagctctttattaaaccaatcagaaggttccccatgcaggtgaggtaaaatggagacatgttcacacagtgtgatcaaatatcccacaacatgcagaccttgagctgggctaaaagaacagacatcaactcccctccccttataagatcctcagagaggaagagtcagcaacaacacatgtgtgaggaaataggtatgaataaagtgctctccagagctcctcttcttccataatcccaacagaagttgaaactgaagaggaaggtgacaattaaatcttttaaaatgatgttacatacttttaaactattatgcttaaaaatggttatgataggaacctgctaagccagacccaggtttgaatctgttgggtgcttgatctcaggtactcccacaccatttttggtttgcatttttattatacaaaactttctacaagtaagaagccaggaccaaatttttaggttgcatttatatggccacggagctctatctgggactccaggtgactccttctttcacagttcatatactatttgtagtttgtcctttccacagtgctcatttgtagtaggaaatgtatttgttatttacttagtgggccatctcttctaccatgcgacggcccttgtcagttacaagagtgtatgaacacagagcaaagacatgtcctcaataggtcaggttgatatgtgtggcactgcagagctgttcttctgacttgagtctctgctcttggggtgtactttcaatacctcatgtttatacagaacttaaaatctcaggtacagcaatgcctgggtttgaaacagactatgagttatgaatataagacctggattactctcatagcatggtaacattggtttcagttcttcaggtgtcctgttaatctatcagtgttatttagtgacctagtaattttatttcctcatatagagaaccatttaattaaaacaatagactgtgctttcagttagactccatataatcttgtggatcaacagctggactgctgagagaatgctataaaatacttttatagccgggcattggtggcacacgcctttaatcccagcactcaggaggcagaggcagaggcaggtggatctctgtgagtttgaggccagtttggtctacagagcgagtgccaggataggttccaaagctacacagagaaaccctgtctcaaaaaaccctttgggaagagatggtgacagaaggccagagaggaagctgagagatcatttctcaaccacacacaggaaacagaaatcaaacaggaagtggggcatggctctaaacccttggaactaccccagtgttgtacttccttcaacaaggctgaaccttctaaaggttacataacctcccaaaatagcaccaggaagaagttatagcaggaactcaagcagggcagtaacctggaggcaggagctgttgcagaacctgtggagggatgccacttactggcttgttctcacagcttgttcggtcttccttcttacagtacccaggaccaccagcccagggttgccaccatttataatgaatgggttggatcctcccatattaattaagaaaatgccctacagctctgtctacagcccagtcttcatggaagcattttctcatttgggcttctttcctctcagatgactcttatcctatgtcaagttgacataaaattaaccagcacacatgggaagatattgtgagtgaatgtacctttgtttagctataactcttgaagcttttaacaatgaacaaaaccactagatttagaaccctgcagtggcatcttgccttgtcaatgaacttgtagtagtggccacacctttgggtgtggtttcaggtgtaacgtgaccccttcaaggcagaggagtggcagtggtgggcacttgctttcttgggtcaccgagagcattggaagggcagactgcatcttctgaagcagacaaaacacggcagttatttgctgttatctgtgtaagttctcccctaataaaacacctatttatcatttatctggggtctggtgaactcatttaagccccaccttcagagccccatcattgaagaagaatttacaaaagttactaagaatctggatatggtcttagccaatactgcattctgctctctccccttgagtattgtagctgagttgaaaagggctcctaagctcagcttccagggacctctttatggtattctcaccaatccagggtgggggagacaggtttcttgtctgtagaatcttaaagtatttttattgggaggtatttccagattcttaggaagacttctgatgggcctactaacttctgttactgcttgttaataagcagaatgaggagacaagatattgtgcgagctcttagcactggctcagagtacactgtgagcactcgtgtctcctcagatttctcacatgagttttggatgcatcttttcttcaacttttcattgttttgacttgagactcactgttgccacagattcataatagtgaccttaagctttggagacagaaatctgatctattctgaatatttgtactttacaggtaaaacaaagacagaccaatgggtcaaagtcagagtggattcaagcatatgttaacatgttgtggtaggtttaccatcactgtgcagataccccagatgaacaaacatgaaaagaggaaagccttattttagctcacagttttggagatttcagtgactggttgtttgctcccattgtcctggccttgatgggagcaagtggaagaaacagaaagagacaggaaggaatgatgtcccaatgtctccttcagggacacatccccaatgacctaacttcttttcattgggacttcctcctagaagtcctgccaacttccattagcataagagtgaaccaagcctttcaacacacgggtctttaaggaacatttaaagttcaaaccataatacgagacactaggaaaaccacaacttagatttaaattgctttttaaattgatgttttaatgtcaatcatagtctaaattgtttctaaagccccacatggttggagctttaaaatcatacagtgtgtataatcacatctgatggtgtaggtaggcattagaatgtggtactgataatggaaattaaattgtgaacgggcctgtaagatgctatagctacatatatagatgactagtgtctgttccaattcccaaagtcaccctcagtccagcatttgatatggagctgggcacatggtctaggagtttggatgttacttgctgatttcccagtcttcaactctgtttcctgcttttctatttctcattagttcagaccacagccaagagtttgatgatccctattcccaaaaggcatagctaactataattatcattatattttaatgattaatgttaactatttcagatgatggaaacattttggggtaacaaaagtgaagagcataggtctggaagatggctctcccctacatttcattcactgatacaactggagaggggagcttgaaaagttccgaactttagccagatttgttgaaaagcaatgaatgatacagttgccataaactaatttaaaaaaaacaaacaaacctgagttgaaaagtaagaatgaagagtaagcttttagtaatcatgctacaaaacttactgccttggtttgtgagacaaagtcctgctacatagcccaggctagcctcaagtctgtggtattcccctgcctctgccatccaagtattgaattgcaggcatcaaccacttcacccagccaaattttgttcttgttttgtttgttctgtgattagcttttgagaatgagtctcctgtaacccaggcttccttcaaacttgctggggagccaaggacaacccaccacctcacacattctgggattataggttgcactgccacagttagctctaagtttctgcattttaatgcagagaactaagctcttttacgcactagactggactccagatgtcatttgcaaaaggagctggtccctatatatggagacttgaataatggatttgaaatgaccttccctgccttgactattctctacttccactattcaacattttcttatatgtcttacacttattgacccctaatacattctaattaaatggatcatgatgccaaagccagaaaataaaaattggtgcaaaaatcatctccctgtctttgtacaagaagtgcagtttgtacaaggaatggtttcacaataatgcctggtgacatcctactaagtcagtctggtttgctgtattttgacattggaaaattctctgattcggctgaaagtgtttctctttttccagcattccaatgactgacagtttctatttataactggttttatctccccacagaagcagtaagatgttctcagttagaaggttatcaaaggagnnnnnnnnnnnnnnnnnnnnnnnnnnnnnnnnnnnnnnnnnnnnnnnnnnnnnnnnnnnnnnnnnnnnnnnnnnnnnnnnnnnnnnnnnnnnnnnnnnnnnnnnnnnnnnnnnnnnnnnnnnnnnnnnnnnnnnnnnnnnnnnnnnnnnnnnnnnnnnnnnnnnnnnnnnnnnnnnnnnnnnnnnnnnnnnnnnnnnnnnnnnnnnnnnnnnnnnnnnnnnnnnnnnnnnnnnnnnnnnnnnnnnnnnnnnnnnnnnnnnnnnnnnnnnnnnnnnnnnnnnnnnnnnnnnnnnnnnnnnnnnnnnnnnnnnnnnnnnnnnnnnnnnnnnnnnnnnnnnctttgtatatgctaggtaagcattccatcaaccaagctacaccctcagtcccataattttttaaaaaaaatgtatttttaaatcttctttggcaatttttcctcaaaactttcatttgtgtatgtctatactttgctgttctttcccacgtatcagaatgcattgtggttaaatatgacagagtttcttaaaagtttaaagttattatcatattgttctgaacagtcttcttgaaagaggttacacgtagggacaaagaggtggtggcacatacctttaatcccagcacttgggaggcagaggcgggatctctgtgagttcgagaccagcctggttctacaaagagaaactctgtctcagaaaaccaaactggaaaaaagaggggggggtagggggagttgttagggctagagttgcatgtctagtgttgtgcagttattttatcccatgaaacattcccttgtaggtgatgagagaagctcctaagtgttaggaagcaaatgaaacacacaaggcccagaaagtaaaccaatcttacaaggctgacaatgcttctgaaacttacaagggtcacaaggccccttcttggggttagagaagcagtaacagtccctgagcagtgcatagctgagcagccaactgcctaaaaccagttcagcaagctccagggatgcaattttcctgagtgggccaggaagtctgaggtgtttaagtttaaattagcatgtctctcctccaaacatttaaagtttgagtacttggttcccagctggtggaactgttagggaaggattagggggtgtggccttgtgggtggaggtgtgtcactggggactgattcatcctttccccagtgtgctctctctgcctcttgctgtggttagagatttgagcactcagctgttcttgacaccaggccatctctcccccatcatggactctaaccctctgaaactgtaagcccagctaaatactttcttttgtaagttgccttggttgtggtgttttcttgaagcaatagaaaactaatggagacagggtcacacagtgcccagtgggcagctgcagagctgacctcctctttagcctgatggaggacagttaattttaaatatgaccctgggttcacacgccttcctagttcacctctagtcccccagttgctttgctaccatcaaggagcggggtttgccacatggggccatctccatatggtcagtttgtgacatatgccaactcagacccacctctcccactcagtattttcaataacacccttccctgcccattcatctaactcctgcttgcactagctcctttccctataaagtgatctactcccttacaagggagcaattttctgatttctgagattcagccccttggtggtgctttgcagttcccataggtaaagagcaggcagagtaggcttctctttctcctggatccatcacaaacagggtctgtaccttttaaaacatgttctgtgtggtttccaagaagggctgaggcaggttgaagaattaaactggcatcaaatttgtgcagtcctgccgcggcgtcttcgtattttcttctcaacctgtttccaatcttcaaaaggaaaggtgtgacaaacgcagttggcctgggatctgagacagatgtttccacagggtagtgctcatctctgttaattgtttcctttagggcttgggaccagaagagtgtagcgggaatttagtgtgaatgtcgaatgctctcactaggccaaccgtggtgcacagttgacttaacctccctatgagtttcctcagttaatcgtggcaaagaagttgaaagggcagagaaatctaagggaggattcactgggcttttgccattttgcctgtgaaaaaggaataggaggtgccaaggagactaacatccgagcctacttggagccagaaatttaaaattactccctctgccaagaaaagcaattacatgaaagttggttcagatatagtttcaaagctgcataatttgaaaaaaaaattcacaattttggaagctaagcacaaatcagatcgagaatgataagaaatgttaatgtaaagaggcacgctgttcaccagggccaagtgaaatgcagtggcgcttgtattttagctggtatctctgttttaaaaaaattatatgagatggaaaaggcataactaccctgatcatggattcatggcttctctggttatctgtgtttagctgaattgccatatgtctggtagacgtggcaagccctgtcttgaagaatcagcacatctccttggcagcagaactgtcagcaagtctgggaaaaccttatgatgcagaagcccatatccaccgtgcacttagacaagagtctctttctgaaatccctcaagtgcttcgatagctaagtgatgtttacattctacaactaattatggaccccatttaaccctaacacccctggccgggcactttattaatgcattgcccattctgccagggtgggtgcacacgccacaggagctgggtgctgtggagctgggtctgcccagcctgggctccagtctgctttgcagacatgttggcactgggctttatcacagnnnnnnnnnnnnnnnnnnnnnnnnnnnnnnnnnnnnnnnnnnnnnnnnnnnnnnnnnnnnnnnnnnnnnnnnnnnnnnnnnnnnnnnnnnnnnnnnnnnnnnnnngtatagtggagagggttcccaccctgggcctcagctactttaattgctgtatttagaggttggctgttgagccgctaatccctcttgatggcagtgatatttaattggatagaattacattcaattattgtaagtgtagtaaggagtgctatctgcctgtactcattaatttttaaattttttaaaatttctgagatactcaggctggagagatggctcagaggttaagagcaccgactgctctttcagaggtcctgagttcaattcccagcaaccacatggtggctcacaaccatccattatgagatctggtgttatgtagtatacataacaaataaataaaatcttaaaatttctgagatactcgaacttcaaggtgtggaccagatgatttttgtggcttctcatgctaatttaaaatatcataaataaaacgacactctgtggaggcgactagtagctgtttctgaactttgtttttttgttttttcctttcaggaacatttgtcatggctgttttttgtttgtttgtttgtttgtttgagacatggtctcttatagcccagcctgccctaggatggtctaggtagctgaagatgacccttaaactcttggtcctcctgtctaagccaccagagttctgggatgacagatatgcgccaccataccctgacatttgtcacgtcttaacatacctttatgtgtacactgcttttctgctgtgccataataactttaaaaggcacaaatattgtcctgctattaagtagaatctaaatcaacacaccgagtatcgaagcagaaagacaaaaaaatgtgaaaaaatgagcaaaacaattctttctaggaaggtaaaaataccgaacacaggctttgggtgcctgggaaaacagagcaatgcattggcttttgttaaagcatggcacagcagacactcagggtgtctgactgccgctgggctagtcttgacttcactaagaaatgtgagggagggagaaggcatagcacacgcaagtcacatctgtggagtcaaaccaacccagctgctctggtcactactaactaactgggggatgttaactaaaccaaggcttttaaaacttttcccacttggcggcccctttccactcagtaccctctttgcaggtatattagggtatttactgataatagtgataatataaaatatctatagataataaatcacaagggagtttattataaaacagttccttggtgtaaatgtaattaattttatactttattggagagaaaagcaaatttgcatactataatgaaatgaatattcaggcttgtatagcacagtacaatacactaatttgatacttataaaccaaggaacagtggtaagaaaatactagagctttatctttctgggattaaaccattacgtctctgtaagagcagaaggtttttgtgtgctcagtacaaactttgctcttcataacatgagccaagttgttgcattgcttggcgttgcgtgtcatgttggaatgtgtagtgggaagtcctcacattgtgtgtccagaatcaaggctacagtgaagtcatggatggaaatttcacatgctttactttggtcattgtgaattccgaaagctttttggcaacatttttatgatccccacattcagctgcttgatcccatatggggttgctacccactcttgagacacttccgtctaaaccagtgggtgatacaagagaggccgaaactctccagttttgatcagactcctctccagagaggaactccatagagagtggagacatcccagctctgtcagatgacctagcttgtagaagagctagaatttacaggagccaaagatgactcagagcctgtgagacatctgccttctccaagaagctggctgtctagccaggtgctgaagtgtaagtgttacaggcacaaaaagtgacagtgttacaaggacacagagagctgtgtgacccagcagagctctgaatcacagaccgtatcattaaggcaacctgggactccctggctttgcatgtcacacaaccatcttgtgaatcagagtccagactcctgtgtcggtctgatgttccatcttccctcccaggtcagagaccgtggaggaagcagaaagggcaactatgtctggatgtagctcggcggtgccactcttctgaaggtgggtgcaagcctggactttgccccagccaagcacacaaacaagataagcatgacaaaaccagacaatcttcagtggtcccaaaaggttctgcttctagctctgcttcttaccagcttgtgtcaactcgacacaagctagagtcgtttgggggaatgggaacctcaactgagaaaatgcacacccaagagtgtcctgtaggcaagcctgtggggtgcagctcactgtgagtagtgccaccacgcctggggaggtgatcctgggttgtataggaaagcagactgagcaattcatgaggagcaagccagtaagcagtgctcctctatggcttctgcttcagttcctgcctccaggttcctgccctgattgagttcctgacccgacttcccccagtgattgactgtcacttggaatttcaataaaataaaatctttcctccctaggctgcttttggtcatggtgttttatcacagcaatagaaactttaataagacagctaacagctacagtcaaatctaagttcagattccttatttctgaatagccatatcctgtgtattgctagtcctaaacagctcctcacccaaacaagttcatatgatgaacaatttagtaactgtgtagactgttaccttttcatcccctaaccacactgcaggtgtctccaatgctgcaatggattcctatcccctgcactgttacaggaagaatgtaccggttgtgctatgtgggagctatgctataaatataattcacaccagacatttggggatatgtaacgttcaaaatgggggcatcggagaagaaagcaaactttcctcctggtttcttaaagtggcagtgctnnnnnnnnnncactcagtcctttccctcagctcctggccttccccaggcacccctctctccttccctttcccagactaagcccccaaaccttcatcaccaccacatttctccaccctccccagagccagttcaatcatctcttgtctctgtgggagaaacttctagtcactggtcactaccatatgaggctagaaggatggctcaggggtaatggttcttgtcactcaagctgggggatctgagttccatctgcaaaccacacacacacacacacacacacacacacacacacacacacagactgtcctgaaactcactctgtagaacaggctggcctcaaactcacagagatccgactgcctgtcttaacctctttgctcatcactctcttttgactctttggggacctgccaagcaactcccaaataaaacatggagacttattattaattatgaatgcccagccttagcttaggcttgttccattagctcttttaacttaatttcacctgtttatagtcatctatggtttgcctcagggccttttacctttgttccatttgtatgtcgtactttcctgcttcctccatgtctgtctgtctggcccctggcatctttttctttcttcctggagcctaaattcctcctcctacttactctccctgacaggaagttctgcctaaacctcctcccttgctattggccttcagtttttttttaactagatcaatcaggcccccttagacagacaaggtaaaacagaacacatcttcatatagttaaacaaatgcaacatatctttctgtagttaaatattctggagcagaggggagggaaataaaaggtgttgaagacttacttggcagatgtggcactgggaaccactcacccattcttgtctttttcccacacagagcaataggatgagaaagaggcaagttgaaaatgtatatttattcttactgggatcagggctgttataactgagccacactgccccatgcttgcaaatgataagcctgcagagtgttggggaaagcatagaaagttctgtgggtgtttgaaggagcctgtatcggggctgccatcacaaagctgtctggaaaagaaacatggaaccagggcctctctggaccacactgattgtaggtatctttaaggaaggtgtcatgataaagtttacaatggaagagaaggacctggctcatgctgggcagttggatagaaaacaaagtgatttgatggagaaaaaaaaatccatttaagtttggcacctgtccctctacaatctgatgggtagagaaatgtaaatttttttggaccgggaactgctgaactatcattttctttttttcagtttatattaattttgagtttcttcataggtagagctggactagaaacattctgaattaaggaagaaactgctaagtaggcaaagctgtgggcttaccattcaacatattcaagccaagtgtatttagatagaatttgtgcaatagtcactcaatttccagggctgtaggagatactaaaatacttatttataaattagagaacaacacctctcaacaaagccctaagagacagatttagagtattaaaatatataaggaacataaaatgacaaagctagataaatatttggggatgtgtaaatgaatggacaagctataaagtagattactcttgctgttctcaaagccatcctttgtggaatttgttgttattgtatttctgaaatgggtttgggagttcagagaataaattctgacttttttaaaatttaaaaggtttttgttacgtgcatgtttgtgtatctatgtgtgtcatatccactggaacaagagttacagttggtggtgcactgtcccctgcgggttctgggatctgaactttggtcctctgcgacctctcttaactgctgagccatctctctagcccccaagactgagttctgttgtgggatgggatgttacttgaagatatgttatatttgtttatgttatggaatatttgtttaatgatacaaagatgtgttgcactcttttatgttgcgtttgttcaactctgtaaagccgtgttactttgtctgcctaaaactcccaattgctctactaaagagctgaatggccaatagctaggcaggaaaaaagatagatgggtctgccaggcagagagattaaataagaggagaaatctaggcttggcagaagacgagaagaggaagaatgagaggagaggaggacgccaggggccagccacccagccatacaaccaaccatggagtaggaaggaaataaaggtatatagaatagagaaaggtaaaagcccagaggcaaaaggtagataggataatttaagaaaagctggctagaaacaagccaagctaaggccaggcattcataagtaagaataagtctccatgtatttatttgggagaggagtggtgggcccccaaacagaacaaaagacaaaacaaaacaaaaaaccaaaaagaaaaacaaaaaccatccaactttagttctgtttagctcgaagcttcataccagttaaaaattaagtcttggttgtttgacctgaatccaggggcttggtacttatagctttatgactagggcaacttaatttagcccctcatctacccttcagttttcctactgaaaatggggtgatgacaagcaccaaccccaccgcactgctaagaacacttgggttttttgagagaccctcttctttggaggaactgcagcctcacccagacaatttgcttttcatttcttagaactcaggctcagatgccttccagtcatcagagacttgagcactgtgctcagagtccctccctgcctatgtatctatttcacactgagttctgaggcagtgcttggcctcttggtctcttggcgactcctactctattgacctgctcaccccgccccattcctctgtcaaaactttcatgactttagtcttcacatccttttatctgcagtctgagcatctctctagatgccctggaccctttactctctcacaagtttatttttctctgagtggaccacagtatctttttgcttcattttcacctactcagtcactgtacttcacagttcaggtcctttcttcatattgtacatactattgacatatcatggcctgggattccagagagtaacaacacctatattcaattactctagcagggaaaaatatcaataataaactatcaggacaatttccatgaatgatttatgccatggtatgttgtgcaggaaatggtgacacctcagagagctagtagctagccatgtacgagatttggggaggattccagattgtgagaccagcaaatacaaaggttatgaaggggaatctcttgaagggttccagaaatagaaccaagcaagataaagattggacttggggatggaaagagagacaagagggacaatatgagcctgtttctatctggggtttcattttcacctggtctttcttcccaccattgccctgactcttttatccacatgcccagtatttcttagtgtgtctgccatgctataccttgggtcattttgtccaattgaaggcgctcatcatctgtcacccaaactctcctagaattcccaattgtctttaatacaaatactcaactaatccaaaatggaagattaattatctcactatataatatataattctctacaggatgcaaaacccggcttcccatcatgatagaatgttttgtatagtctggtggtaccatctgctaacattgcaaaacaaagcacatgaggatcctctcaactcccaaggcctttgttaagtcattgcatctcatggactctattttttcctgataactgctagaagaaagttttatacttccatacagttataaacagattccaagatggctccacgttcttccagctttttactctcaacattatgtgacccactcttcatcgtctgcaaggcctgtccttgtttctagtcaaaagaacatggtaaaaccaaagggctgttgtttcttccacaactattttaatggtatatcactatttctgggagacttctttctgcttgctttgaaaagggcagctgctgtggtgggggaaccaagaagatgccaggaacaagcaaaactccagtcaggaacctcaggatctcagttgaatagcgacaaccaagtaaattgtgctaattaatactgtcaacctgacaggatctagattcacctacaatcccaattgctaagcaagcctgtgaaggattacctatcactaggcaagcatgtaaagattatctaccacgaattgaggatcatctaccactattgagcctgtaaaggatcatctggactgtgttaataaagttgggaagacccaccttacctgtgagtggtgctattccattgagtggggtcctgggctggaaagtgaaagtgagttgagcaccagcatccatctttctctgtttcccagctgcagatgcgatgctgatcagctgcctcatggtactgctgccatgacttcctctctacgctggctgcaccttctgggagtcagaataagccctccttccttacgttgtctcttgctaggtattttgtcatcacaagaagaaaaataattggcacacagatgttgcaaccaacatgtgcatagagacatgtgctcagctgcccccagtgagatcacagccccagccaatacttcgactgaagctatgaaagactctaaaactgaggttctgagtaagctgtgcttcaaatcttcaggcatcttagcatcatttttcagtccttttcccatctttgttattttagatacagtctcatttagtccaagttagccttgaactcactatgccaccgaaaatgactttggactcttactcttcctgtctctgcctcccagtgcagggaggacaggtgtgcaccccaatgtctatctctttctgcagccctaaagcaccaggtcatgcaggccacatgccattatttctgatggacatggtctgccctggctcacacatccttcaaagatggaattctcctcctcccctcctccccgttgctccccacacctgagtcagacatgtttccctgttcttttcttagcagaacatcgattcctcccagcagacaccacctccctggaaagatggaggagtcagaggtcacactttatacacttaattaatgtttttcattgactgggtcatatttacatccttccttagtacctatatagtttaatttcatttcctaaaaatatttaagtaggattttcccataaaacccccagatactgtttttgggatgagagctcttaacatgtgtaaagagtactaatttctctgctttctgatgagtccctttaatcttttttgtcatcattttcattcacaaatgtatggtcatctttccaaactccccacaattataaagagtcaaagaatcatgcaagatgttggggaaagagcccagtcatgaccaaagcaattgactggccctgtagtctctctctctctctctctctctctctctctctctctctctctctcacacacacacacacacacacacacacacactcacattcaggacatttgaggcccacttttacagtaattctgtctctctgtctgtctgtctctctgtctctctctctctctctgtgtgtgtgtgtgtgtgtctgtctgtctctctgtctgtctgtctctctgtctctctctctctctctgtgtgtgtgtgtgtcccttgttcttgaattagtgacacactttgtcccctgcaccccaaatatctccctaatgttatcttttatctctccagtctccaacttcccctggggaaacttgttgagaaagaagctaattttctctaattgagatatgcaatttgaaattctaattctcgatgatagctttatttcttctatagcatgttggcagttgatagttatgagcagagtctctcttttgggtcattggtgggaaaaattcagctccactaagctcaactttgcacatctaaatctaggcacaacagtaattgggagctcctgtgtgtaactcacaatgttgtcaggagcttggaaataagacttgcaaatgaggccgtgagcgggtgcaccagtcggctgcagactgctgggtacaagcctgagatagctattctgattttttgctgcattttacttttggtcttgaatgtggcagcgtttttcttcctagatgctctcatttcccaggtccctttgccatcagctgtgcagttgtaatagacttctctgtagatgtggcatggccatcaactagggaaaagaaaaaaaaaaaactctcatttggaaaattgctctttacatagaataaatagcccccaaatgtctgttatccccagagctctgatgagtttaaaagcaaaacaccatgccccagtagcttaataatgaatgctatcatctttaacaatggtaatgaaaatgatgtcttaagtagcactctcctaattccgcaagcatttgcacatgtgtgactgtattacatgactacccgaatgttgtgctttggtgcatgatgtaattcctctcttaggataggggctcggagggcacttcatgttcttatgagcagcaccagcagcggagccgcaaagagtctttgtgttttccacaccagcctacgtctcttttcagcagtgcattttctctatctagtcataaataaccttggttcaggtgactcttaagattccaagtagggagcaattttactgctctgggttcccaccacacagacacctctgtcagtcagtcggccattttttcaccagggaacaaatcttcgcggcttcagattttctggagatgggtgaaaagtgcttcatttcattttccatctcagacacaacatccttgtggttgagttgtagggttgcttcccctcctcacttagtgatatttgtccgtcatcctcggccttacattgctcttgtgtttatcttttcctttaaatagtgtgtgtgtgtgtgtgcgtgtgtgtgtgtgtgtgtgtgtgtgtgtacatgtgtgtacatactcgtggagaccagatgtggacatcaggtatttttctcaatggctctccatcttatttttgagacagagttcctcattgaacctagagttcattgaatcagctggactggctggcccatgcattccagggacccacctgtctctgccttctagccctaggattttagaacttcagacctcatgcaagcacttcccccatgcccgatacttgatgatatttatagccacttttttttcaaaatcttttcctatcaaccctatcatctattggggatctagtgccattgatagctttgatagattttctttttggctataggccatatttaccactttttgtgtttctaaccagtttaaccattttttattgtatatggtaagtacttttgggaggactatttgaatttggttatttatttttattatgttgaattcactttggcaactttgaaggttcatgacctaagggcaatcttggagacttgtttctgtattttactgatgcaacactcatctagtatgtcctttacttctgggttagttttgcattgttattattaaaataactcttcttagcctggttgtctcaaatattctgccagtaacaaatcagaaatctaggacttaacagccccaggaacttgagacttgcttggcttttagttgcttttaacctctgatcttaccatattttgctccattcatgtattgatataaaataatgactgtttcaaaggaaataagaaaatagttcattttgaaggtcaacaaaatggcttaggtggtaaggcactcactagcgtgcccagtgaccctgtcaatctccagaacccacttggcagaaagagaaaactgactcccacaagttgactgtcatagatgtacagtggcttgaatgcattcacatgcacacacacacactgataagtaaataaaaaatgatgaaagaaaatagtttattttgagccaaatgtgagtaactacagaaccaggaacatggactcacattactgtgaatgaatgccctaccatcaaagaggtgacatgaactttattgttgcagaataaaagaaagccagaaatcaatgcaccaaatgcgttgatggagaataagaaagtgaagctattgcaaagtggtaaaattgatgagattctgctatcatattaaaacactcttagctccagtgttgctggagggtggaagtctacgaagtttagctacaccttcaagaattctccctgagtcacaagaatgtcagatcagatacagaggttaaaataaatagcattttaagggagcaagatggcctgagatggccttggtgggaaatctcagcttcccaacccccagaagcatgatgctctgagtcacacagtctttggggttttaacagagatgcaccaataccagtcaatatttattgtccaatcatatggacccagaactatgttcattatcatactcatagcatgggttgaatattccttatactcaaatgctccaaactggaagtttcaaatgttcacagatgttacaatatttatatattcataataataattttattttattacagtatttatgtttcatgtatacctttatacacatggcctaaaagttaaagataattttacacagtattttttaccccaccttggcttcaattaaatccaacccactaagtcagaggtggaattttccgctcatggtgtcgtgttaatgctaaggagtttcaggttttagatggggtttagatctgagatgtttgaccagtattttaaattagcacaaagatgcctttcagagtagaggatagaaagtctagtgattggcctatggtcaaatggcttctaagtggaaaagctgaggatctgaggtgtgtgtgtgtgtgtgtgtgtgtgtgtgtgtgtgtgtgtctgtctgtctgtctgtctgtctgtctgtgtctatgtctgtgcctgtgcctgtgcctgtgtctgtgtctgtgtctgtgtctgtggtattggctatggaacctaagaccttgtacattttaggcaagttctaactgctgagcccaagcccaagactgaaatctgaacacatatagtctgattacaagtccccatgtcctatgttaactgtgataactctagctttcccaagaccttttttgattgttcctggtgctctgttcaatttaatgatcacaatcaagaaaatgtcataaacaatgattttgcctcgataagtggtattttaaataatcagaatctgaatcattctgttttcaaaaggccctaagagctgggcactgtcgttgcttcacagtcaagggggttgaagcacactgttgtgtggtaacttcttcaaggtcacacaggaagggggcaacaaagaaaaagctgatctctgttgctcaggtccagaggccctgaccttaccctgctccatggctctcacagaaaaggctcacattgcaatgttagggttctcctgccctctgcctcagcctcctatacctcctgagcttgggtcttatctactctgtccccctttcttagactgtgtctccagttgttttcctaaactagtggttgatgctagctgatgacctagagtaatgctaaagaaatgagggtggggtgggccagggagggtgttgctttgcaatgctattaaagggagccctgtttcttcttaagactgattaactgcaggtttgcatttccaaatgtaattgtctttgaacatggctggaatctggaagggatggggtcttcattaggctggcagttgtgcacagattacttgagtttaatgtatttatagaaggtctgtgtgtcacacaggccttggggaatacttgcactatttaaaatataaattagaaaaatatgctgatgtaattgtctgccctgaggaattttcccctcatcacactgccttcatgccaatgtgaaaactcctacttggccagtctccccaggcagattggagtatgcaatgcaagttagtgagaaatgcttggtctgaacacaaatgctttgtagtctagggctcttcatggaatttatcatctcctgcttctcttctacctgggaacatctcttatctcctacctgctggtgtcagtggctttatgtgatagtctctgcttggacatcttcaatgtttgcttgtctctaactgcaaagctctataagtggtcttaacttctttcttcgtctacgtgaaaaaagggaaggaaaaaaaagaaaaagctacaacatctggtttgaagtggatgatcaataattattttgaaatacagggtgtgttgtgacagaaaagactatgattaaagggaaatcaatcctaaactgtttttttttttaaatgggtctcacacatgccatgtggtggtggctcatgcttttaatcccatctcttacgaggcagaggaaggtggatctcaaatgtggtaaattactgatatgaaatccataaaattaaggtaacttttaatagataaacgccagccaacagcaagccagagcgtgccaaagcagcaaggcgagacagcacccatgtgccttgtctgtccctttaaaacctctcccacatcagcttgaccacaccctgatgggcgtggtcgggcacacctgtagtcactcctttggaggcatgattatggtgtctccctacagatctttgtgagtttgagaccagcctggtctacagagcaagtcctaggacagccaaggctacgaagggagataaaccctgtcccccaaaacaaaacaaagcaaacaaacaaacaaaaagatgggtcttatatggtccaagctgactttgaatcactatgtatcactaaaaatgaccttgaacttcacatatgtgccactgcccctagtatatgaggtgttagagagccaacccaggaattcatacattctgggcaaacactctaccaactgagccacatttccagctcaagttaggttctggagaaatttttctagactctgtagttttctttttggggagtctggagtctgatggcaggctagtgattttcaaaataatggcagtgggaacctgttgagatgcaagtcaaaccatgattaagtttaaaccccagaaattgccggtgacttcacatccatttggtgatgcctatgtagcctcatgcccaaaaccaagctcatccaaaaccccatcctctccaacttcacctcctgctgtcacactcttcctcagtctgcccaaccaccctggctttctccatgctccttcaccaagcaaggcctacttctgcctcagggcctctgcacttcctgttgttggtctggaacagtggttcgcaaccttcctaatgctttgaccctttaatacagttcctcatgttgtggtgccccaaccataaaattattttagtttctacttcataactgtaattttctactgttatgaatcataatgtaaatatctgatatgtgaccctgtgaaatcattcgaccccaaagagttgaaatctacttttgagaaccactgatttagaatatcgtttaagatatgtatatacttcttcccccttttattcaatgttaccttctcaatgatgcattttctagctatcttacttcaaactacacacacacacacacacacacacacacacacacacacacacacannnnnnnnnnnnnnnnnnnnnggttttatccccctcaaccatattctttctcctaaaaccattattacttttccatatactacgaattttctctactttttcttcaaaggctctttaatggccatgttttccttttccatcttattctctattgtatcccttgcctagaccagtgcttggcatgcagtcagtcagccatattatacatttattgtactgatgaatgaaagccaccagttggtgacatgccagcctcctccggctctctgaaggaacatcccttgcatttatggccttccttttggctgtggtagtctctcagtcacattctctaatgagccaagcttgcactgcatttaaataaatgctttttcttgttttttgtgtctaagtattgttacccaattttattgttacaataataattgctgaaatagtgatagaaaaaaatcactaacatcttggaagtggcaaaaataaacaaattcaaagaaggccttacaggcataaagcaaaattatgtttattctattaaaactacaacattaattatttaaaatgtaattcctgggaagcccacccacctacccattatgctccaggctcaattctaagagctggagtcaccatgatgaattagtccctgtcttcttagagctatgttgttggataattaacaaacaaacacatggtccaggctgagataagctgaaagttaactcagtgtgttacacagagatgcaaagtggggccaataaaaatggctttgcttcatcctgatttaaggtcagagagttcaaaactatttttactcttccaaggttaaagtcataagacctaaaggtctaaggtgtagcttctataggatatttggtcttagtcgtggatatcttacctaactaacaagagacttggtctgaggtatggttactcttatatttttggttgtgagcctagcctttaacagctgagccatctctccagccgaggtacagttactcttaacctgcaaggccagataatgagagatttagtctaagacgtggttaccaaatgtttggagaattaaggaagaaagtctgtttcttccttatatcttgataaagaagtcttttgccattttcccctttttggttggggtatgtaagaatgttgaagaataaacttggcactttcaatatttgctggattgccctcctgactttatcctgtgtctctgactcttcttagtatctttacctgtggtttctcaatccacacctccccctctcaggtacaaaccaggcaaatcggctagattcaactggagcccctcatagatgggttactgcatgtaacccataaaatgggaaaatattttaagtattatgatcaggaaagaatgtgttagtcaggctttccatcagtgtgaaaaatacttgaagaaagcatgttaaagggagggaatttatctttccactcacagtttaacagatctcagcccattgtctttggtgagcctatggtgaaacagagtgtcatagtcgcaggagcaagtgggtgaagccgctcaccctgcagaagaaaggaaaatatagagaaaggagtcctgggccaggtacaaccttccaaggcatgctcagccaacacctctcccaaatatgtccttcctttcccaaaatagttccaacagcttgggacctagcatacagaagctcctgagtgacatctcaaaattaaaactataggagagagagtaggaagcattttagagaagtgtcccaaactaagaaagtcacataactacaatgacccccccccctttttttttttaaaggatcagtaagtataatgtccctgagatctgaaagtctggtgcaataccaactcccttcattctgggttactactgattgtgtgaagtcagcacaaaagttcaagcagattcatccatcttcagtgtagaagcaaggaacagctgtggaaatttgaatctcctgtctaccaaacagatgagtttggtgcctttcgaatgcagtctagaacttgcttcagaatcacctgggagcttgctgaaatgcaaattcttggccctcacttcagaactcctgagtcagatattttcaggacagacctcaaaatttgcatttaaacagctttccaagaggctcccatgcaaagatggttgaggtgtgtgctgaatggttttatgtcaagttgatacgagctaaaatcatgagaggagggagtctgtttcttcaattaagaaatacctccatggaccctgagaaaaacatgtatttctgggaaggggaaacagataaaatttcctgagttaaaaaaaaaaaagatttcctgagtaaattgggagggtgaaggaagggtaaaggggagaagtcaggggaacatgaggaaacggttgagttgggacagagagggagatcaaggaaagagataatctaggtagagggagccattatagggttagagagaaacctggtgccagggaaactcctaggaactcacaaggatgaccccagctaagactccaagcaatagcagagaaggtgcctgaactggccttcccctgtaatcactggtgactaccctaattgtcatcatagaaccttcacccagtaactgatggaagcagatgcagagttccacagctaagcactgggcagagctctgggagtccaggtgaagagagggaggagggattacatgagcaagggaggtcaaaatcatgatgaggaaaccagagacagctgacccaagctagtgggagctcatggtctctggactgacatctggggaacctgcataggaccaaactaggccctctgaatgtgggtgacagttctgtgacttgggcagtctgtagggcccttggcagtggaaccaggatttatccctggagcataactggctttttggaacccattccctatggagggataccttgctcaacttccatacagggggtgggaggggcttggtcctgccttaacttgatataccagactttgttgattccccatgggaggccttaccctttttgaggtgtggatagggcactgggtgggggaagatagagaggggaggggatgggaggaggggagggaggggaaactgtggttggtatgtaaattgaaaaaaatctttaaaagaaaagcctacataagactgggctgcaggcaagcctgtagagcattttcttaactagtgattgatgtgggagggtccaacctattgtgggtggtactatccctgggctgatggtcctaggttctataagaaagcaggttgagggagccagttagcagctctcctccgggcctctgcatcagctcctgtctctaggttcctactttgtatgagttcctgtccttgctgttaatataaagctgtgagtgaaataaaccctttcctccccaagttgctcttggtcatggtgtttcatcacagtaaccttaactaagacaaaagtgttggaataagggatctcagtattggggttgcctgtgctaggatggcaaagaaggaattctgaagtacagagattcaaggctggtttagcagggccccctcttccacttaagatactgctttctttttgttctttcttttagaaatgtctgaaatgcacaaatcatgcaaatacctgtacccactttagacagtaaaaaattaaaagaattaaagagattgatgatatctgtgggattagctggcctataggatgacccaaggcgcacacttttgcatctcacaccacagaatgtttttgttgttaatttgggtcctttgtcattctggaacatgataaactcctaacaatatatggaaacttgtttacattttttttcagaagagaggggcagtaattttcataaagtattcagaagagttcaagaagtttaagaaccataataaaaaaaaggtggttagctaactctgatcaaatgttaaacacattttgaaagccagggaaattggctttcttacccttaagcctccccacatccaaattctgactcagaattagctttgtgggtggcatttttctttgtatatagagtgtactcatttatgtcatagaacctcataaatagcaattttatccctgtcaggattgttttgacttaaatgaggtgggtagggttacaaattcccctggtctccctcctcctgacctgttatctctgagggtgacagctaacctttgattctccagtacccacacacacacacacacacacacacacacacacacacacacacnnnnnnnnnnnnnnnnnnnnnnnnnnnnnnnnnnnnnnnnnnnnnnnnnnnnnnnnnnnnnnnnnnnnnnnnnnnnnnnnnnnnnnnnnnnnnnnnnnnnnnnnnnnnnnnnnnnnnnnnnnnnnnnnnnnnnnnnnnnnnnnnnnnnnnnnnnnnnnnnnnnnnnnnnnnnnnnnnnnnnnnnnnnnnnnnnnnnnnnnnacaaatccctcctttgctgtctccccatttcacctggcatacagccaaccctgctatggccaaatgctatgacccacggggctctggatcatctattccctccttttcccctctcctgtcatcccttcagctctcctcttacctaatcaccatctcccacagaaccttggtgtggggatggctcacaactacccatgactctagctccagggaatgtgatgccttcttctgacctctgtgggtattcagatattcacacacacacacacacacacacacacacacacacacacaccagcaacaagccatcaattctttgtgatttaaaaaattagtcatatttttcttttgcttgagacattaattatttttctgttaaaacttagagagttcccgtgcaccccaaatgttcaaatgtatgctttgaacacatcactggcaaaaatgatgtcctcttagactgcacattctgtatccattctttattctttgctaaggaaatgggcgatatctcactatgtgagcagtggccacttacctgaaggcagctgttattgcccttgtggcttcccttgtcatgattaacagtccctactttcttaaactttttcatgccatgttgttttaagaaatctttccttgctggactagaaagatggatcagaagttaaaggcacttgccatcaagtctaaaaatccgagtgtgatccttggcactcacatagtggaaggagagagccggccccttccggttgtcctctgacctccacatgtgtcaagggccctcacccccaaatatagtcacagactgtaagtaaatgaaaatataacagaaatctttcctttggttttttgtttgtttgtatgtttgtttgttttcattgatactgtcccaaaatcgaaaccaaatggcacactctgagggggatttggaagaataaagaaagcagaattagtgatggagatgtagctagagcatttgactgcttagtatgtatgaggatctgggttcaatcaccaatgctgacattttacacacacataaacacacacacacaccacacacacacacacacacacacacacacacacacacgtgcatgcacgcgcgcgcgcgcgcgcacacacacacacacacaagagacagagagagacagaaagacagggagagagagagagagagagagagagagagagagagagaagcattatcagctctgctctttaagatgttaatacactagccaggtggctgtggtgtacaactttaatcccagcactcgggagacagaggcaggcagatctctggaagttccaggccagcctggtctacagagtaagttctagagaaaccctgtctcaataaaaaagatattaataacttggaaagtaaaaatacaagtttgaccttacattaactaaatccccagaatcttagccagtagggccactgtgaaagtcatatcacactacctaactggatgattgacacttggaccaaattgtccaagtcaggcaccaggccttgcatctgccactgccttttacagctttgtgtcagctctaggtttcatcaactgtcccttccttttcaccacttttctgtcacctgagcattccaaggcagaggggcctatgtgtctctgagcagatggtgacaatcactggcacttccactctggggtaacatccaaagccccgtgttctccaagagctagagagtcttgatttccttccctgaatccagttccacttccaggaattcttccctcacctcacctgcttctgtttggtcatcatctttctgtagtacataacattttcctctctggggggaggggggaaagacccagaacccagtggtaagccatgagatgttcacaccagctcacccagaccccagtgctctctgatggtgctctgccctcccctgagccctaagaaacacctccatgtttagtaatctctcttcccctggagacacagagggcactctgctttcggtatgcctggtacaattgctgcccattcatgaatagcactcaaagtaaagctttgttatctatggtgtcacacagctgcactgacctacagtcaccacaccatgtcttctggagccaaagaggatgctagaaagacagaactgtctggagaatgcatctttcttgcatggtgctctccgctagtgttgttacttgcaatcaaagaatcttggtcaccgcagacaaccaccaaccaaggaagagggaccagttctgtcatcctccagcacagaactctgaacatccaagctcttcttttcttctggagtcaggatgaagcagctgaatctcctcttggactaattctcaccctttctcctcacatgttacagctctggcctcagcagggaaaggataatttgaaaattacttggatgtgcattgaactgaatttatgagacaaaattacacagtgcaatctttgaggtttagtttcacattgacatgtgactcttgtgattaaaacacacacacacacacacacacacacacacacacacacacacgtctccgtgagaggtctgctgaagacatggcagaagccagctgtaaggaagaccgtagtgtcagccctcagccatcacagggacagccagactgaggagatgaggggtatcccactttctcttgtgttacaaccagatgttgtttctgtttataattatgtttttatttctgaccttattagcactgccaaaaacaatcacgggactccacactgatcaagttgtatccttcaactgtggtaggtcccagttgcttttcaagtttcactctgcactgaaagggtatctgtttgatcagtggatatccacatggcatgcccaattctcaagttaattaatgtctgttggcttcatccacccaacaatcatataaagacagaaaccatggactagtgagaaaaataggcaggcatggatgtaagactggggcggggtggggggagcagtgtatgtttgtatgtttacccatgagttcttaggggctggctacagcttcccctacacatgaggaaactcagacaaatcatttgcttccttttcagaaaacagaaaataatgacctcattgccaaacatgttactgtgtcaatcccatgtctttagttgcattttcacaatgtctacttatgaacaacattaggaacatagcaagcatcttctattcaacacatttttgactagtatgtggctgggactgagactggttctggggatacaaccatggaagtagcagcctgtggtcagcccagatcctccattgtcaaggctgcctgttgctttagatgtatattacacagcctttccactagaacaagtagaagccaggtgtgatggtgcatgtctgtacttctgaagcagtgggaatgtccaaagtttgaggtagatcttgggtacactgaacattccaggctagccaccaccacaacaaaagaactgaaatttgtcctccatggtgagattcaagacaccaagaaggatggagcgaacctgagtaaggtgcccacctgattgcaatcaactgcagaattttgtactgtaaggttctcattctagacctgagacataccaggaccgatccttacattacagggttcagttggtaacactggtcgtattgcttagcactgatggactgattagaactttgtgactatggagagttagagtgtcacagtttcagccaaactttggttatctttcatctccttaatagccatccattgcccacctctgtgtctgacctaacatcttgtgaatctcaggtaaaaccttctgggacatatgaacttagaagaccattagcatttataacaccgatccctgtgggcctataaggccatttgcattcaaaccaccagactaggtatctggctttaagggttcttggccttacagattgaataaggaacaccagggaaccttagcaatctataggcgatgaaggaaacatatattaacaagttttgggattgactccctaactgtaaagggcttttaaagcccagctttctattccttattagaagtttcaggagcaacagagaggctaccttaagtgctctctcctgataatgagattgatgactaattcatattacatcgtatagccttcatccaacagctggtggaagtagaagcagacacccacagctaaaccttgaactgaactggaatccagttgcagagaaggaggactgatgagcaaaggggtccacaccaggctggtgaaacccacagaaacagctgacctgaacaagggacagctcttggtccccagagtgatagctgggaaaccaacatgggactgatccagaccccctgaatgtgggtgtcagtgaggagaccttggaaatctatgggacctcttgtagtggatccatacttatccctagcataggaatggactttgggagcccattccacatggagggatactccctgagcctagacacaagggggttggcctaggccctatcccaaagaataagacagactttgaagacacctcctatggaaggcctcaccctcccttgggagcagaaagggtatgggataggtaaggtgttagttaggggggtcaggggaggaggagagaaaagggacttaggattgacatgtaaaataattttctttctaattaaaattaaaaaagaagtttcaggaaaacaaactttaaaggaatctcaataggtaatattgtaacaacatttatgaaagcagtcagatgaaatatgataagagtaggtctatttcatgaacaaattggggtttattgtgatttttttttgttagaaatgaaggtgtagcaagtccttctgtggacctgctatacagctacagctgggcctattgtagaacaatctttttgtacattgtgaatatgtgttgctgtcattggttttaaaaagagctaaataaatggtcaatatctaggtagaaaaggttaggtgggactttcggaaatgaagagtgtggggatgaagaaggtggagtcaccaggagactggggatggagggatgggagggagccagatccagaacaagttgaacacacaaaatgtgatagaggtaatcaagccatgaaacagaacacaaattaatagaaaggggtaaatttgagttataagagctagttagaaacaagcctatgctattggctgagcttttataattaataagaagtcttcatgtggttatatttgggaggtggttggtgggatagaaaagtctgcctacatggacccgtgttaccactgaaggcatggggatgcccatggtccgtgctgctacctgaagccatgttgatgtctgtgggccaggctgcctccagtgatcatgttggtgtccatggtccatactgccactgaaaaccatgctgatattcatggcatgtgttgacatcaaaggccaggtggatgtccatggtccatgctgtcaccagatactatgtagaagtcgatgatctgagctcttgccaactgtaaaagacacagaagcttctgtggtgtcagtaattacagactatcagctgagaaagagggacatagaaggcttctatggcaaccccctggcctcccccacccccaaaaagtaataccctagacaggaagccagtgaagagaactcttaaaacttgtcataaggatcctggagtgtagctctccataacagaggttactggtgagggtggggtggaaagaattcacttttctttaaggagctggacacaaggagtttgaccatgctccagttacaatacaaattgaactcttttttttaatcttttttttggggggggtagaaggccacaaggggttgggggaagcagacctgggaggactggaaagtaagggtgaacagggtgcattttgtgaaattcccaaacaatcaataaaaatattatgatgataataaaataataaatcttaagataaatttatacaaagaaagagaaatgaaggtggctgttaagtagaaagcatcagtctgtggaataccccttgtcagattctaacccacagctctacataaagtcttcgctccaaaggcttatgacatgggtgacttgataagaacttctgaggactacagttagtcctactgttgagcggcccattcagggtgttcacttcaggtgctgcaaacagacattcagattgcgatgtaggaaaacagcaagctcagacctagaaacctcgactaaccttcccctggacttgagagtgagcttctagtgtgtttctgtgtagtaatctttgtttttctcctggttatctcaccaagctcatctattgctgctcatgactaagccatatcctcaatattttggttttgtccctcagaaagtcattgttaaaatcttccttgtgtgatgtatttatctcagtattcttccaagtgtgttatcagtccttatctacttctaggtggtcttattatgactaacgtggcaaccggaagatcattaacacaggaaatctttcttcaaggagctccatcagcatcgtgagttgcaagcccatgatgagacagactgacccaaggttcaattagtctatcattaataaaaaacatgttggttatttaaataagaaaattgcttcaaacaaaacaactggagtgactgaaccaggccccctgaacatggatgtcaggagtcctgggcagtctatgggacctctggcagtggaaccagtatttatcccgagtgcacaaatggactttgggagcccattccacatagggagatactctctcagcctagatacatggtggagggcctctgtccttccccaaatgatgtgacagactttgatgataccccaagggaggcctcaccctccatagggagaggatggggagtgggatgggggattggtggggagttggtggggggcatgggaggacagaagggagagagaactgggattggcttgtaaaataagtttgtttttaatttaaataataatttataataataatttttaaaatagagtaaatgactgaattgctgaaatgcttgtcatgctagaatgaccacctgagttcatcctcagcacccatgtgacaaagtcactagggaggcagagacaaaaggacccctgagactctggctagctagtcttgttctatgtnnnnnnnnnnnnnnnnnnnnnacctgatgtcaacacacacacacacacacacacacacacacacacacacacacacacacacggaattaaaaaggcatttatttttccaagatggcctaagtgttttgtttctttttaagcaaagtggcctcaaatgtaaacagtgagaagaaacctgagcttaagtaagaagcagacagtcattcactcaccagggactgtatctccaaccacacccacacaggcaactcctcactgggtccagaacggtgaattattcaccgacatccaatcacagcctaatataagcccacagttcacacttcagagaggaccatcttttcccagtgttcatgcttcttatccagagttgtcctctgcgcagataaactctgcttagtttctgtaaacttttcatcttagtagctgtaactgcattgcaagtaccaataaagacacaccagcaagggcctcctgtaacagaagaggggacggattttaattggtcctccaagggtattcaagtaagactggatggagtgaggaagaggggaaggatgacagaaagtataccatgtgtgttggtgtgaaatggtggagaaagtgatcagagtgtgaaggaaccttcctgaaccttgagagcctgtgggtaaataaggcagggagttattgcctttggcagaggactatagaacctaggaacctggcaggcaagttcattattcatgtgacagtgaacgggaagcatagaaggtccttgaacaagggaggagctgaagattagcagttgtggtggtgagggggattgagcctgaaatttctgcttgagaagtgggcagtggagcccagagatgaggccttaagacaataaacaaaagccactgtctcacgatgattgattaaagacattctatcatttcagcaaggagaaatttggaaataacctcaaggtttctataataacagtgctacaattgaggtataattagacaggagggaatggagccattaagatgtaacctgaagtcttctttgttaatagctacaccacggggatacaactgaggattagggaatggagccaggttggctcaggcaagtgtgaggagccagcttcatgttggcatgttgaattttcctaggtgccatgtcagagtggaaatactgtttttaattttagctgaaatataaatcacaaattacatcttcatttcttagaaagatctgaactggtcaatacaaggatatattgtccttgcccttagccactccagttgggagtactcgacaagaaaacacattactgaggcactaatcagcctgtaacatgttagtgattcttggcatcttcacgctggaaagtgggagtctgcactacagatgacactagaaagcattcatagaaataatggacaggaaaatttgttgtcattcatcgccatgccaaccaagcttggggaaacaggcgttggtgactttctgaacttgtgcattttgaagaaccccaacagcatcttagacttgccattatcttttgcatcatagaactaagggtgtttatttctgtagtaaagaccacttacatatatgtaactaaatattctatgtgtatcgtcttattttccggaacaaagtagaaagcaaatctccaggtggtgaacaagattcagagtccttggagagcctttctttctcctctcatcttcaagctgctctgagaccctttcccctcccaggaaatgttcttgactatagggctgtaccggacccttaaagagctcacagcctggtggggaaatacatcaaaaagtcagctatgctgcagccttattctcgttttacaggacatcaagctatacgaataaaaattccaggaacctagttagcagagggagccatatcgaagaagtgatctttgaaccctgacttgaaagacaagggtacaagctcagccaaaggaagacagagcatcccttgcaaataaatgacaaacatggcttgaagactgtaagcgagacagataagtaaggaaagctgtgtggttgattggtggtgttggaggaggtgtggggcagctcagccaagtcatccagccaagataggacttaagcctgctgggcgccagtgcctgctcttggcctcgctccaaggcctgttggagcttgtaaaagaattcacattaatttgccttttttaggtatcttgaaaatcagtaacaaatagatttctcattttatgatggcagtgcggccctactgtgcaagggggcagctttgaatggcaaggagtctttgaagttagctcagccggagaagaaatggatttttctcaagaagccataccttgagaagctatacaatagaaaaacaaaacaggacaaaaacaggtgtaacatcacactgatgtactaaaacacaagaagggaattccagtgtgttgtaaggggacccagatagaaaatgcccagtgtttccaaagttgattatttgaacaagtaacttttgattttcactgtgtaagtcagtctctaaaatttggggtttactttgtgtttttacttctccacgagaatggctatcatttcagtagtagcttctgtgaaaatgacaactgtcttgtcagtaagaccatgacttgaagccattttggcatctttaatctacaggcaggatttatttgaaatattaatctgatgttttcacaagcaacattttcacatcaccaccccttctttctcttactgagagttgctttgaactcactatgtagcccgggattgccttgaactcacagaaatactcctttcctgtctcaccctcctgaatgctgggattacaggcacacccaccatgccagacttctctctctctctctctctctctctctctctctctctctctcttcctgtgtgtgtgtgaattcacatgtatgaatacatgaaactaagcatcctccttatccaaaggaaacaaaaccaacatctgggtcatgaggacccttataatgctagcacttgcgaggcagaagccagaggagtccagtgttgaggctagcctgaactacatgatgagaatctatctcaaacaaaacaaaatcagaagaatcctattcttcacaacaatatgtatgaatgaatttctaaaatagtatgcttaggaaatagaaagacaaatactgaaaaatcttacatatagaatctaaattatttgaaataaaaactgtagaagcagaaatttcaaggagctggggagcaaggagggatcttagttaaagggtgcaagctcccaggtgtgaggtatgtgggttgtgtggcccctgacagcacggtgactacagctaagctgcagatgtgatacaatctggaagtgggtagaccttcaagttctcaccctgttgtcccatgtgaggcatccgggggcaagcgttgcagctaactcagaaatcaccatacaatgtgtacacgtatcaaataatttcaacattatcttcagtttatacagcttcattagttgcaccattagaagctaagtgagaaatcttttgaagtgaaaatttaagagccaagcttccttttcgggcaacttgattggaatcttgagatgtttgctttcccactgatcctaatcaagaagctgtcctttgccagatcagttacacaggactggcaggcagggctggaagctttagaagtctctttaagcagaaaaactcatctgtagtgtcacaggccagagccatctacgtgacttctaagcttaaccgtgtcttttcctacaccattggtctttctattttccctttctcaatttttaactttgttctttattatttcttaaaaaacgagtttgtgtgtgtagcttatggtcttgccacctgaaaagtttgttttaacccaagtttgtcctcaaaactttgttttagatcttttgactgcaattctttcatttagtgatagaacgaggtattagattttttttcaaaggatttgccgaggttcaaggttttcacacaggcatgaattcacagttctgcagctgtccaagcaatgctgcataggagttaaactcacagggtcagctgtgtgcattcttggtagctacgaaaaccttttgtatttcatttcttcatggttagtatgagtttgatgtgaaaaataaattaataaatccatgtgtagcccttgggataatcatgtactgttttgttgtcatttctaatgcgcctttcacagaagcaaaggtttgtcaagcatcacagctgcttttgacttctgaatgttccactttgccatggagagagggggagggaagaggagagagagagagagagagagagagagagagagagagagagagaggggtgttctccccacatgtgtgtgatattccccatcaagggcaggggagggagtctcacaaattgcagtcccattttcaagcagcattcaaaaagttgctgaactccagcttggcctccataacaacttggctttgtgtctccttggatagtatgaaccagattttcaaaaattcttctcttgtagtcttgcttaggatgagtcacaaggaagatggcagatggaatgatctgccattcaagaattggcagacatagtcactgatctgctgatgtgccttgttggccagagacagcagctggacctaaagacactctatgtcctccagacagagatgtgtgcatgtggctccaggccaaatggtcaggcttctggaggacacattacccaccaagaatgcacataggtttcactccaacaattcatttgaaatccctatatatgattctgtgtgtgtgtgtgtgtgtgtgtgtgtgtgtgtgtgtgagtgtgtgtgactcacctatgtgagtatatatagatatcaaaagtcatcttctgctgtcttatatgtgggtgctaaactcaggtcctcatgcttgcaaggctagcaaccgactcactgtgccatctcaccagcccacgtcatgcattttcaatgaccataaagtttcttttagtcatgtaccatgtttaaatcaagaacctaaagagagcaatcaccttgcttttagtgatggcacagcagcaaacacttttatgcatcggtccttccagggttctctgattattctcttaagacaggctcccagaagagagactgtttaatcaaatgctaagcacaattacatttcggttcactttatcagaatagttgctctaatttactcttttactggctaaggatgaaaagacctgattcctcagaacttccttgaagttttaaaccagggcatctcccactggacttcagctttgatgaactgagttgggattttgtttctcaagatctgttatagccaaagggcgtctcttaagccagggggctgctttgcttcaactaatcttagtcacacacatctcaactctttgggccaggaatgaaagttccaatttccctgcttccctccaggtgtctctcttgggaatatctctgagacttcaaaaaaggggtcaaggtgaggaagtcctagaagcagctgagaaaacgtgctgaaccagcttgcttgaggaacctgctgaagccttcaccttgcgctcaactccagagcgcctgtagatctctgtcagcaagctcctctctgcctgagaaaggataggcttcacaagttctctacgcgtccacagccctcacgctgaactcatgagtgcacttgaaacacctttcatagggagctaaagaaaaagctggggtgtgtggggggggcgtgagttagcggctcagctgatccacacacatttatattttcatcctgtttaaaagggttctctcactatgcaggctttgagggggtcccagtatgacaaagtccatttcaattacagatcgcaaataaccattaaaatcatatccctgccaagctctcattttctaatgtaaatccactcccctctttttaaaagacagctgggaaactcatcttcctccaaggagagcaggtaaaatggcttcagtccacagccaatgactccgtctaccctaggttcttggctcaggtaaggagactacctcctttttataacaggatattcacatacatgggaacctcatgtgggcggcaaccaaacttcatttctctactacatttcccagaatcctctttgactcctagtcctgtctaacttgctgtctcattggccaaacaatattttatttaacaatcaataagataaacatacacagtacattccccatcacatgtgcttcaggagtctttgtaaatgaagtttatctcaaaggtttgttaagtgtttggctctgagtgggttttgaacggtaggtgactgcctaattaatgaacgaattgtgtatctaacagtgtggttcggatgtgtgatggcatggttgaaactgtgtgacagtgtggttggggtgtgttctggtgtgtggttgggtgtgtgatggcctggttgggtgtgttctgatgtggatgggtgtgttctggtgtggctggggtgtgttctggtgtggttggggtgtgttctggtgtggttggnnnnnnnnnnnnnnnnnnnnnnnnnnnnnnnnnnnnnnnnnnnnnnnnnnnnnnnnnnnnnnnnnnnnnnnnnnnnnnnnnnnnnnnnnnnnnnnnnnnnnnnnnnnnnnnnnnnnnnnnnnnnnnnnnnnnnnnnnnnnnnnnnnnnnnnnnnnnnnnnnnnnnnnnnnnnnnnnnnnnnnnnnnnnnnnnnnnnnnnnnnnnnnnnnnnnnnnnnnnnnnnnnnnnnnnnnnnnnnnnnnnnnnnnnnnnnnnnnnnnnnnnnnnnnnnnnnnnnnnnnnnnnnnnnnnnnnnnnnnnnnnnnnnnnnnnnnnnnnnnnnnnnnnnnnnnnnnnnnnnnnnnnnnnnnnnnnnnnnnnnnnnnnnnnnnnnnnnnnnnnnnnnnnnnnnnnnnnnnnnnnnnnnnnnnnnnnnnnnnnnnnnnnnnnnnnnnnnnnnnnnnnnnnnnnnnnnnnnnnnnnnnnnnnnnnnnnnnnnnnnnnnnnnnnnnnnnnnnnnnnnnnnnnnnnnnnnnnnnnnnnnnnnnnnnnnnnnnnnnnnnnnnnnnnnnnnnnnnnnnnnnnnnnnnnnnnnnnnnnnnnnnnnnnnnnnnnnnnnnnnnnnnnnnnnnnnnnnnnnnnnnnnnnnnnnnnnnnnnnnnnnnnnnnnnnnnnnnnnnnnnnnnnnnnnnnnnnnnnnnnnnnnnnnnnnnnnnnnnnnnnnnnnnnnnnnnnnnnnnnnnnnnnnnnnnnnnnnnnnnnnnnnnnnnnnnnnnnnnnnnnnnnnnnnnnnnnnnnnnnnnnnnnnnnnnnnnnnnnnnnnnnnnnnnnnnnnnnnnnnnnnnnnnnnnnnnnnnnnnnnnnnnnnnnnnnnnnnnnnnnnnnnnnnnnnnnnnnnnnnnnnnnnnnnnnnnnnnnnnnnnnnnnnnnnnnnnnnnnnnnnnnnnnnnnnnnnnnnnnnnnnnnnnnnnnnnnnnnnnnnnnnnnnnnnnnnnnnnnnnnnnngtgtgtggggtgtgttctggtgtggttggtgtgttctggtgtggttggggtgtgttctggtgtggctggagtgtgttctggtgtggctagggtatgtggtggtgtggctgggtgagttctggtgtggttgggtgtgttctggtgtggttggggtgtgttctggtgtggttgggtgtgttctggtgtagatgggtgtgttctggtgtggttggggtgtgttctggtgtggttggggtgtgttctggtgtggctggggtgtgtggtggcatggctggggtgtatgaaaagtacctcttcctactaacaaggaagcctctttctccttagcatcacttgaaacacttttacagttttgttacaaatttctgaggcctagaaccccagttacctggaagtgctgtttcttactaatagctttcttacccagcaggcagagctgctataagctatggcaggctgaggagagagggattctgttttcataagggaagaggctctttccttttcaggtatggtgtgacaagcagctctggagataaagtcacatctctgtcacactgcccttctgtcctggatgttaacctgtattacggtttgtgtccaaggcttgttgctcagagttgtggggaggtggtggcacttttaagaggtgagccttgtatggtcatctggactggaacattcccattagagggtcatctggactggaacattcccattagagggctagtgtagccctaacctcactctgttttcattcatgtcctgtccatggagtgactgacttgcttcactagtgtttcatgaagtgctgcctcactacagccccaaaagcagtggggcaaataaatgactatggactgagacctccaacgctgtgagtcctttccactttgcaagttgacttatctcaggcatttgtgatagtaacagaaagctgactaactcaaaagataacaattagtgaaacttttggggtctggggcaggtaacgttttaaagggaggtgtggtgagaagaaaatgggctaaaggctttcgtttcatatactttgtggtctaggcttagtctcaggagagcagttcacaatgactagtcaatattacttggtactaattatattagacacatttcagaaggcagcctgcttgaagcctatcattttattagcaaggaaagtccgaactctgacatgtctctcatctgtatctttgccagatctattcactaaatttatctgcacatactcaccccacatacacatagtcatacacataattaaaagtaaagtaggtcttctaaaaatgcaaatgattttggtagagagtttggatatcctacctctgaaatgtctgggaccagaagtgttttagatcctggaacatttgatagtgaactgtttgggggatgggacccccagtctacacacaaaacccacttatgcttcatgaagattgtctgaaggtaatttcttttaatattttttggtaggtctatggtctgactgtgacctagttagatgaggtaaactctggaattttccacttagggtatcatatcagcactcagaaagatttggaatttggaacattttagatttcagatttttggattagtgacactcaacttcttttaaccttgatcccatgactttggtaattttacttattgtaaattgtttagaaagttctaaaacatttgtgttacctgtaaaaatcttcattgctcctttactgatttaaaattttctttttattttattttattgccacagccaagatgtccagtccaatacaacactgaaggtaagtgacagtgagtgtagcccacagggcatagtgcaggctctgcacgcccaagatcacatactcttaaggaacagcaggctttgactagctggtgcaggtatcagttgaaactacaagtgttagagaaatgtcaaactgatttacctactctgcaagagagaactgtcatagttgaggggaggatgcatccctaagatgatgcccagggacaaaacaccaggtgggaagcccagagggagaagaagaagaagcaatcctcctccctcctcggcttccattcctcctttagcaatggggtctatgacaggatcactctatagaggagagatgtggtttgcaaatcatagacccagcatcacaaaactgaatacagaggataaattcagtccaggggccgcagattaataacgatcgctccagaagttcacatatcaacgtcagagaccatggcatgaccctgagcaactcccaaaaagtccacagaacttcacctctgctttgttttactttcatggcatgggaaagaccatcaagctcagggtaacacaggttcactctgctctgagctctgccccacattgaggccctgggaactcagctctggggaagcctcttgacagtgtcacttctaccatcttatgccatcatagcctttgtccttatttctcccacattctccgaattgctgtcactttcctccacaaaagtactttactcttgatcctgagagaactccattcttagcaccccctgttttaggagtctgcttccttccagggtaccatgagcatggtgacctcacctctctctccctcttacaacgtcatgcacacattcacaaacacacaggcaagtgtgcacagacctggcaacctcagctcagaaacccaggacggaagcagagttagcatccaactttttccttggctgattctgaagttcttgttctttgtgtctgccctgaacactacaattctttagtcttcaacactaagaatcaaaaactccaccttatatcccttcatttttaatttgcttttaaatatcttgtcgtatgtgacaatcaaattcctgtttaaaatgtaggatggtttatattattttctgtatgttataagaggaaactttggctcagatcctttcctaacagagaggaaagcaagtccaaaggaaacacagatggttgatgaacccacctctgtttcagtgtgttttccatctgagctcactttaaacattttgagattaactctataccccaaactcccccagtctcttttccttcctctgcctggaagccatcgggcactgtttgttcttttagagatggctggctttcttagaagttagtttctagttcctggaatatttaccagcacatttgcctcttattccaattttttcctgctttttttttttgagtgctatggtctgagtacttgtgtcccctcaaaaccaatatgttgagagatgaccaggtcatgaagcctgtactcccatgggctggagtacaggcttatgaaggaggattgaaggagcctgttacctcaccaccaccttgtgagtgctcctgtagaaggtgagtgttcctgtagaaggtgagtgctcctgtagaaggtgagtgttcctatagaaggtgagtgctcctgtagaaggtgagtgctcctgtagaaggtgagtgctcctctagaaggtgagtgctcctatagaaggtgagtgctcctgtagcaggtgccttttgttagcacagagcaagccctttcacacattgactcagctgtgcctccatcctggtcctctcagcctccagaactgtgagcaatacacttgtagtttttacaaagcaaccacactatattgtgtattgatatcccacatgagccaaggtatgtggcaatctcttgaacatctacctttttgtttcgatgtggtgagagagacaaacatcaaaaggcctgcgcttacttcactgtgtgagccttagtttgcagagccaggagaacgtagctatttgtctacagatttcataggtgctgcatcagtgctgcaagcgtttgtagctccatgtccctccagatcgccctctggggagtgaagtatttaatctgctgggccactatatctcaagtcttgaagtagaattggcatcaacatcagaactccttagctagattcaattgatcctttcttggtccctttgttattattggttttcaagaggaggtctctgacccagacattcctcagactcactatgtagaccaagtcagccttgaactcctgatcctcctgcctccatctcccaagtcccatcattttagacacgcactatcatgactggctcatatgtgccagtgaaagctagaggccaatctagatgcgattcaccttgttttagaggtggagtctttcaccaaacccagagttcactgattaggctggactgactggccagagagcttagggatccacctgttctttcttgcccagcactggggctagaggtgtgccccacatcaggcagacaggaaaggcaagtcaatacgcaaacagatgctggagacacagcaagcatggaattccagcagagcaatgctatccttccattttcccattgacaaaaatgggtgagaaagcctgggtgatgatggcacagtcggtaaagtctttctatgtgagtgtaaggactccggttgagattctcaagcataaaggcttggagtggtggtgtgcacttgtaataccagcactagggaggcagagaaaggaggataccttggattactggacagtctagccaaatcagaagcgtcctgtctcaaaaattaaggcgtggagtgattaaagaagacacttaacattgacatctgacctccacatacacacataccccgtatattgtacacacacacaccaaagggtgggtgagattgcattattttctcatcagaggctgtgattacatgacttcataggctatgctgcatcttgtggctttctgttctggttctatgagcatcaggagttccaggggaatgtattgataacaaagtccttagaaatgtctctggcaaaataattcaaaattgacttgggatgatgaaggcatatgtgtagcaagctttcttgttggactatctttgacttgctagcccccaaataacaacatggagacttattaattatgaaagcttagcctttagcttaggcttgtcccaactagctcttacactttaaattaacctgcttttattaatttatgttctgtcacgtggctttgttatctccactccaataccatatatctgtgtctccctagcataaactgtgtacctagattccttttcctcttcctctctctccccagaaactctacccatcctcttctattggccattcaaccctttattaaatcaatcagaaggtgccttggccaagacatatcttcacagtgtacacagtgccccaggagagcgggtgctgggtctggccagaacctgacatctctatgatgatctggaagagggagccaatggctcgttaatagagtctgaaaatgaggtaaaatgattgatggtgttctgggaaacaaagggattagtaaagctagaggcaacttatggaaatgctcactcatccttggatcagaaagtcaccatctgaagtcgtttaatggaagtgatcagtccagaaagcaccttgggtaccagcaaatgcctggagacaatgccaggaagagatggggagctgagccagcacaattggaatttctctctggaaggatctggcaacatctggccagggttcatgagttttcctcagctcttgatacacatccagggaccctgaagtccattctgttctgcctgattgccagcttggcctcacacttcttgctggctgagaaagatgccccagatgggtttctcatcatttcaaaccagtcaagtaggtgctgtttaatactttgtcccctggaggccaataacaaggccaaggctaaagacatgggtctgtctcccatgcagaatgctggagaatgttccagcttgaattggaagtggttatgtgtaaggataagtctttctgccaagccacccaagcccggctgccacgtgggcgccagaaacaacacacagagtctgatattaattacaatgctgctggccaatgactagggtttcttatctgatatctaagtcttaagtatcaaccataattgttaatctatatattttataaagacttatctgatcaaggatgctggtggcattcatcctctcttgtggggatcacatggcagctcccagagaagagaggaggagggagaggaagagcatgatttcctgcttgttcctgcttatattctgagtcgcctgctatgtcacttcctgcctgaatcacaagacttctttttactacatttcccagaatccttctcgactcctagtcccacttatcttgcttccctattggccaacagtactttgtttaacaaccaataagacaaggacttcctctatcagttaagtctttggcttctactgtcatcctaacccaggtgtgctctatttttagtcttgtaccaagggtaatactgcttgccactacagagtttagccgccaggcttgctggatggatacagtaccctgagtgtttcccctggcatctgcatgcctcccttccagtacccttttatctcctgaagcattgggaaagactgaagaatttaaggtatttaagtgtcaactagaatccagccctgacttcagaaggccagggtcaaacatatgtttctccagacttaggagtctaactgtcccctgaaggttgagacaaattccttctctcctttcttctccccatatttttgttgttgttgtctttcctcctgttgttttaagatgaggcttcaggtagctcagactggcttctaaatcattatgtaactgaagctggtcttgaactcctaaccttcctgtttcttcctccctctgagattacaggcatttgctattttcttccctgtcttgactgttagcttaatcaaaccttgtaacttctgagagggagacagaaatcgtcttttgtggtgacagtcttacctgcaatcaggaagtcatggccagcttctcactgtagcatagcatcatgtatattacattaaaatttttaacccagaaaaagcacaattgcttcttatgagagcctggagtcgactcagcaatgctatctaactctactgtcttgggctattaataaagttgaatttatgctgattcagcatttggaagaattatggataacaggatgaacttgcaagtaaatggttgcatgattactagattaacggagaagaaggaaagggtgggtaggatatgccaaatgacagtgtccagcacacgatggataggattcactcttcagactggggttcactggtgtctgcgccacactagcttggaaagccaagatactggagacccccacatcccttttctttaagctccatgtacacttggtacaagatacacttccttcttgctctgtaatatggaaatatccactttcagtagcagtcctctgagagccatgcttggccatgcccagaatggactgtagcttctgacctgaactcagggaatcatggaaaagattctgtagattctcagaccctggtcagatctgtcccttgtcagacgtcaactggatgcttgctcagcattcaacagcaaacagctgacagttctgaaccctgtatccttcagctctgcccttcccaacgtgcagcctccacctgctcactggttccttgtagccaatgcatcagtggctgctacgattacatttcatgtcaccctcaattaacctgacaggatacagccctccctaccccctccagacactaagaggagagaagaggcttaaggtagaaaacagaaagaacttttatgttcttggctcttctgcaggtaaatctctcagaaaattgcacatttattctttccaggctctgagctcacactgcagcagcccagatctggaagtacctgtcaatttatccatcagctttcacagggtggaaacccctgtgagactggggccactcggcatactggggatgctaatgacagggtcacagcaaacgcctgtctttgtgcctggtgggtacctcccatttcatctttcagataaaaatagcacagaacttgattgtagaagaaataaaaagtgtgtgtgtgtgtgtgtgtgtgtgtgtgtgtgtgtgtgtgtgtgttgtgtctccacaggatagtgtcagagccaaatgcctgtgaaattttccaaggaaagtgaaaacatagttgctgtcaacctctttcagggaatccatttttcccctctctgaaattggactgaatacaatgcagaggcattgcagtctgtaccaaagctgtggctgttggatatttctccatatgcaaatggagcttatgacatagttactcacattatctatacaacacacaagcagcatttattacccagaaagcaacattgacaattaaactgaaagttggggaagaaacctagctagctacttaatctcttttcaatgctggaatatgccaagtatattttattaaaattaatggattataggctattatttcactgttatatcaatcattgaaggcccaagatatatcactgacaaattagcaaatacaaatgcaccagttgttctgtggtatacacctttaattccagggttcaggaagcagaggaaggtggatctctaagttagaggccagcctggtctacagagtgagttccaggccaatgggagctacatagtgagaccctatctcaaagaaacaacacaacacaacaaagagggacacccaatgtggcaattagctttagttaccaacttgactctgatgagtagacgtgctgacacttcccctaggcagggagtcctgaactatatggaagtagagagagcaagtcaaatgagcgtgcgttcatcattccctgctttcgactgtggatatgataagactaattgtttgacatttcttccttgacttccacagaattatatctgaaataaacccatttcttacctagattcctttttgtcagggtattttatcatcagagaagcaaaaaatggctctaggacaaccagttaatattgattttcagataaacagcacatattgcttggactataattataccaaatattactaaattttaaatttagctggctatatagtttatttggcaattttacaaaaacacctactttcaagctaggtacagtgggctatacctgtaatcctcgtttcttgggaggctgaagtggtaggattccttgagcccgggagtttgggctcaataacatagtaataagccattcatcagctcagaaaaaaagaaggagaaggaggagaagaaaagagaaattaagaaaaaaaaagaaaagtaagaataccaagatatctactcaagagaagcatgagggtggagagatctgttttggttcagtgtcagaagggtcagtcagtcctggaatggctctagacacatgcacagaacctgtacaccagagaagattcttcatcgtttggtgaccagggaacagagagccagaaagagactggggaccaggaattacctgcaaagtcatctctcaggtgacctacttccaactaaacctatctcctaaagattctagaacctcccaatagcaccaccagctgggacccaaaccttccacatttgaacctgtgaggaacaggtcacattcaagacagaaatgctccaaatgtgtattccttcagtcctcatcctcattatggtttccttgtttataacccatggctcctgtagttgatgtcaccaccctaatgtctgccaaagtgcatgttaggaaaactctgaggaagccgggaagtgatttgctgcagctgttcttctgattgtcgaagtcctgggcttcactgtgtctgtgatcagtatacccctgatgtttgcttccgggtcttctttgccacactcatttcttcatcattttgaagtataaatacgaacacagggtggaactatacaaacaattggagaagatactggagtccgagaaagtgtggaggagggagatagggaagtatggctgttaatattccatggcatgagtatctctagcacagtcacacccgtggttggccacaattagttgactgtttcaaagtagctggtagggagggtttgaatgtttccaacacaacagcttgatgaatgtcgcggatgattattttttatgacctgatcactctatttgtgtatgtgtagacagaccacactgaacccctttgagctgtataattaccaggtgccaattcaaaggaaagctgcataaaatttccatgagaaggaaaataagaacctcaaggtgatatttaaagtttacaatattactctggctgctttgcttttagcaagctagttccaggcaagcgatgctctatttaaagcaggggtgagtgagcatcttgaatgggaattttaaagggttgtctcacctttgttgagaaactttctgaaacagagcgtggaagtacatgcctgaaatcccagcactcaagagccagaggaaagagaatgctaggctgtgagttcagtgttagcctgggctacgtaatgtgttccagatctgccagggctacatagcaaaaaaacagcaaaacattttctaaggaatctcattgtaagaaattaatatttttagctttccactaacaagaaaaggaaaaatagatttttgactagtaaaagttttatctttttttgatgcggcattgctgtgtttactaagtaaccaagacaatatagaacagattctttagattcaagttggccttgagatggtcaagtaggatgatgggacatcatagcaagagcaatgccttccagatgatgtcaggaggactggaaacatccaggtcctggatgaaagggctcagtggcttccggagtggcccctgctccctggtgggctacctctggactgtgaaccttgctgcttgctctcctcctccagtctctgtgtcactgcctcttgtcaagtgctcatgatggcacaggagccttccacctgatacccactgcctgcttttcccatgaccaagttagctttcatgacacatttgaaatgccccagaggggacagctgttagagtctacacattgcctgttgctgttaggttggtaactcacagagggctcattcagacacaccatactgtgggaaaatgcctcagtaagtaaagcactcttggccatggccttcggaatacttttcagccagatccaattttaagtataagtccatgtacgctgtgtcttcttgtcactaggtcaagagctgacattcatttgttcatttgcctcatcgttcctagttaattttcatgttccctcacccattggaaaaagcgtattgagtcacaatggcaatatgcaattctattattatttctggggtcacatttgagattcaagaccttggagtcattatctgctttttttccttttcactgggaagtttctcctccagaaagttttatcatattttttaactatcttccaaaattggctcaaagtgctggtcgccataaaaaaaatattctgtgggaaatagggatagactacagcttttgattacagttgactgaaagtcaagagaccctggattttgtaataaaattatcacccagagattcttttctcctgggttaaaattgtctaccccagatagtgtccctgtagcaatagcttataaggggaagaactgcaagggtggttctctatgggctttgcattctgaggcaagggttccttgtggtgaaaacttccataactcagtccagtaaaaatgtctctttcctcacttaggaagtattaggtgaaattattgacaaacttcatgtttttataggtgaaaactagcaaaatatcttccattttccactggccaagtgattgtttttcagttacatattttcaatgcacgcatctgtgcatgtgcaccgtgtgtgtgcgcgcgatgggtaaacctaaggttaaccttggatgggtgtctttcctccaaatccatcttccaccttggatgacttttttttttttttacaaagtctctcattggtgttctggggctgacataccaggttatgctggctgaccactgaggccaggaagctccatcctctgcctcctgagcacggtggttacaagggtgcattgccttgctttgctttttacacaggtggtagaggatcaaactcacacccatatatgtagcagcaagccttttctgcctgacctatcttcccaactcaaatgtgcccatcttaatagcacagtttcgtgtgtgtgtgtgtgtgtgtgtgtgtgtgtgtgtgtgtaagcatgtaaaaaagacgacaacacacatacacacacacatacacacacacacacacacacgtatgtacccacacatgtatgtaccagtgaagacacaaatgtaatcttctgacaaactttagtttctcagacaaccagctactgtagaccaattgtgtcttctctaaaattcagtgtaacttgtgtgatggagtatataaccttggtgtctggcttctcacccagaaaggcctgtttcttcatccacagcatggcagtcagcagcttgtcttactgttacagcttataactgtcagtttctttacccactaacctattggtagatatttgcactgtttccacttggggctgattatgaaactgctttggataaatatttgcattcagatctgtttgtgatgtattcatttcacatggatgaatagggatggagtgttggaccacatctaacttactaagaagctgctatctccctatatgtttatttctatgctattctgttcccctggcatatatatttaactttgtgggtacaaatttagaaaccatttatgatgttctgaatttaagtatcagaagtcttgtagctttgccacttttttctggcttttgtgctcttcataactctagaatgaggggctggagaaggaggcttagcagttagtagtgtctggtaaaggaagtgatttggttcttagcacctgtgttgagctcttcatggccacctataactccagctccaggggagccaacgccctcttggacctctgtgagcacctgcactcgtatgcatatgcccaccaactgcaaataaaatagatctttgaaatacatacataattaattttaatatattttacttgcaacagttaggactatgtgcatgttattggtctgtttctttttagtaaaatgtctttgatggggtaatagcccaattctgtactttacagagaaaagtgcatcttccttttcagttttctgaaggagtttctactgttgccactaagacttccataaatatttgatggcattcattatgagaatctgctgtgactggagttctctttgtagggatttttttaattatttcactaccttaatctattcaatttatttcaatctacttcattgatttttaactctcaccttcatttctttccatctccccaaccagggcttaatttacttgtggatttgctgggaaggttctgaagggaagctgacagaaacagtgtgatcctcactgtggtgatttcttaaggtgagggtcaatgcaggtaagagtagcatggtaccccaagactagaactatacaatggatggagggtgcgtctcagaggtccccttctgcccattctttgcctttcagaaatgttgactacaaaagcaatcttacctcagatctatactcctgttacacctactagataatttcatcatctcagataagaacctggagacagcattgaagctggctttgctgctgctcttgccacacagtgactgatgagagtgctaaatctctgctgtgtccacacttggcaagtacagctggcatgaagactagaaacaggaggatggaagggtgttaggatgcttccaacccacatccccagctaaggtccccaatcaagaacatctctaccagagtctacggtagagatgtggagattcagacaccacctcctttggcttacttaaggtgatccttaagtgttagcaatggcgtggactgccttggtcagcttgtaggagtttaaaacttcccaatcatctggtgctactggtttagttgtgcaggtagctcctgcaactttggtcaaattaaatggtatgtttctgactgctttgccaatttcatcatccccacagcatccataaaaactaggtacagcttccgatgattgttctgttcacattggtagttcctgtacatgtaacagtgaagcgtggttcacagagaacgtaggaatttgaggttcccaccattaccccatagttataagtcagctttctatgtaaccagcaagtgaaggcttggtatccatgtggcaaacagtgtcctgagggtctagttgcagctgaagacaaaggtgtcatctatgccattttccattgtctatcaatcacctgagaagggacagattcttggtgatgttgaaaatctttatgaagaaaaggagtgtagaaagaacagtactaatatttgctatcgctcatgtggtaatcactagcactgaagggcagcactgtaattactgtagatgtagtttgtggttttgtgtgtgacttaggcttcacatgaaaggaggagttgagctaacaaatgacggggtgtctgagggctgttagagctgcctattctttgagtctaggcaggtggatgaagcagcagagttnnnnnnnnnnnnnnnnnnnnnnnnnnnagagagagagagagagagagagagagagagagagagagagagagaatgtgtgtgttttctcacagtaactaatggtgattcattgtgtttgttttcgttttttgtttgagatagggtttctctgtgtagccctggctgtcctggaactcactctgtagaccgtctggccttgaactgcctgtctctgcttctcaagtgctgacattatagatttgtaccaccactgcctggcttactaatggtgattcttataaatataaaagaaaaaagtaaaagttacatatttttaatttgcaaagctattaactttctttccctttattctaaagctatctcaaaatatctgtgtatgagggaagtttccaccaattctagccctggcttagaaaccagatcttctgtttctagcttcagttcatgcaaaaatagacagagtgggaacaatggcctatgggtttcccagaggttgtcacaaaggattgaaaaggtggttttcaattctccatcttctattgccaactggactcatgccaagttctagaaacacaagcctaccccagtaaataacctgtgtcgtgctgtatgttttctgttgtcctgttctactcaaattagtcaaaggcagatccttccttgtgctcaacattgtggagccatactttggcatccgaggagcctgttactatgtatggtcaggttgactgaggtcaaagagactacaatgttgagttcccagttggtagcaatctaaattcttggggaatgctagtcttttctctcagggtgagggtaaattctcttgcttaaaagcttcctcttcctttcttagatgacttacatttgtaaaaacatgttcttagcagagggccacagggctagagaatctgtcagatgagcgatctgaggagaaaggaagagggtcttggaaaaaactcaaagcagaggaactggcatctagcaggaagaacatactcaaaagagaattaggctaacagctaaaaatgacaaaggttcagtgaatcacaaaaaggtcacaagtttttcttcattttccaatagctttgggaaaaaaaaataccctttaatgaaactatttggatgtcagaatttgggttagacatttcttcttgttaattaaaaaaaggtaggatatccaataactagaaattatcatgattcttcactccaaattatctataaaatgaacaatgtaagttacatcgagcgttcaacagaacggccactagcattccaaattatcttgggtgaacttgtataactttgtaagatatgcataagaactcaaatcagatgaagatatctgacaaggagccattgataaagtctgaggcagcctttgagaacttacaaagatctgatacaaatgtctattgtaaagctacaagccctccaagcagaatccagtcattgctgacaacagaacttataaataattggcctttagtcaatgaaaattttggaaacctatcagagagaaaaaggaaaaaaatagaacatataatatttctagatggtcactgaggcacaatttatctgttgggagatattagtctgacaaggtcttaaaattttcagttaccagggcctagattgaaagtattggctgttgttcacaacattaattcatgtccagcctaaccaggtgtgtctatcctatggcccacgggttacatgcatcccagggtagtgatgtgtttgtagatgacaatttcatgttgcagtgtcaaaaagttggctaccccaaaccaaagagttttgttagagtccccatgtggttttccagtgatgtctgcatccatgtaagctgtgtctgaggataaggctagaggtactgagactgtggtctacacacccctataagctgttatctgagggtaaggctgtacatcatgtaaactgggtctgaacattggactggaagtgctaagcctatgaatttgttacactctgttctacacagcattgcacgtgacttccatttgtagatactattggttaaaaagtgatgtgtgtgtgtgtgagagagagagagagacagacagacagacacacacagagagagagagagagagagaaagagagagagggagagagagagagagggagagagagagagagagtctcctctaagcaccttgcaggaactacctaagtttgttctcacgtcacacacttaccaaggccatccaggtaggaaaggcaaccctgaattcagtcccggcagttgatgggcttcacctctgtcttccagacagtggaagtttcaagggttgtgaggggctggtggctgtgagtgtacactgcatggcggttgttaaagcaccaaaatacttccgtaaactgaccaacgtgagcatcgattctatctccctaaagataaagagttaatgccaactccagctggaaacttctagaaaccaagtcaagaaccaaatgttgcacctctgtccatgggtccttggtgtgggatttcccccgaggatttctggggcatgcatcctgggtgtggttttattcactttcatccagaaacctagaagattctataaatgtaatacttcctacttttttaagctctgaagagaagtgtggtatatatatatatattctaataggattaaatagtgaatttcacttcctgcctccaggagatgctacacagcttttctgaaaccttgccttctatacatctgtgaatatacccaaacatgaattcataccgtcaattaacaattaacctggcttgctagtggatgcnnnnnnnnnngtggggcacatggaaataacactggtggtttaagcttatatatatataaaacagcttaccacagctatcaagtttaaaagcagaaagctacctgcaaagctgtagttccgactataaatcagctgtattggttaaaagttaacatttttattgtcttatgagacttgtatttagcatgttttaccaagctcattcatagttgcttcatgattgcctttcattcatcattggaggtaaaagaccaggtcttatcttcaaaatgccttcactgttttattagggagttctttttaaaaggcacgtcaagaaaaatggggtctttgtgggtgtcagttaacccttttggctcatgtgtctttcattcttaaaaaaaaaaaatagggagggtattttgagaaacagatgacatctctgcataatgtatgtatagcccaacaactaattcccaagttgttctctccctagatattgtcaaaacaaaagacaaaattaaaaggtctttattttgtgactccagaatggaaaccacttcagtccataaaaggtagtattttatgggccgagcaagagagatggtttcacaaagaaacagaaaaataaaagcagactgaccttnnnnnnnnnntgggaagtttagttatttctcttaaccaatttcatgaaagattgtgtgacagctcagggtttgtgaccggagctttggcaccaatgactctagtttgacttttgtctggtcattaggtcactgggagtgtgtcctaagagagcactgtggaaccctggttgattccttattctctccttgcttctcagaacacagtaaggaggtttgctttaccatatgttcctgccatgatgtaccatcgtcatctcaaacatggtccatcaacatctgactcagttctctaaaactgagagccaagatgaacctctgattcataagcgatcattatagacagttttattttttacagtaatacaaagatggtttaagttcaccacaatgcacaaggtaaatcacaggtcagtgacttctccttgaggaatgtcctgggctggccatgcttggctcactctcatcgatcccaatacaaaagagaccacaaacatggggcctgtgtcaccctctcctgtcctagcatttctctatcattaacctaaagttgcaaggcaaacgtccttgtcattgttcagtttggttttctactattttcataggaagggttggtctggtttatctagacctgtttgtgaaagagaaaacctctcttgaatttggttttgcccagggcattttcattttcttcaagggttagtacaaagagccttagtctgctgtttcttccaaccattgagttaatacagatgtggccaaagaaagtcagctgtgaatttgaaattgcaaaggaaaataaataaatagaaagctccaggctggagagatggctcagtgggtaagagcagttgctgttctctcagaggacctgggttcagttcccagcgcctctaagatggctcacaagcagccttaacgccagttcctaggatccaatgccctcttctggccactatggctattgcatatacaaggtgagtaaacatacacgtataaagcaaattttaagttttgggttttttttttagcaagcaccaagttttttttgttttgttttgtttttgttttttgttttttttaagctcacaggaaaaatgctggcattggtaatgattccttcctattttatgctagcttatttttagcatacactcagctttagatttttaaaaattaagcagaaaaaaaatggagtaaaggttagagataaaatagccaagggtattgccagtgtgatataaaacatgctggttttatagggaaaacatacctctgaagtgaaaatttgaaatttaagccatgaaggtaaatattaatatgttggaaaggaaaaaaagggggagataatgcattgacttcaaaattggggtaaaagcagggaagcctagtgactcatgggagctaaggcaggcgggcagccatgctgtcattcaaaaatagctaaatgttctgggattgggaagcagacacctcagggatgcttggtaataggttctccattttacaataatggggagggaaggaagggaggaggcaggggaggagggagggagacagagaggcattgagaagaagaggtgaactgcttcgccatcaggataataatcccccgtcaaaacttgcttttctgagcacctagctgtgtgccaggccatcctcaaagctcctggctttggtcaattctctcgctcatgcccccacctccaccctctagccagccccagcctctcttatagatccgagtgctggagcgcagtctggcagctatctggccaggaggccttgctctctgtacagcttgcccggaaaacattggaaacagaagagagcaattagctcctgtgcaggtgtgagacttggaggaccaaaaattttactgcaataagggaacagagacaaaatagaatccatatttatctgtatgaacacatttttttaattgtggggaagacaaaaggagtcacccgttaggagcatttatttgtgcagaaatggctttagaaatagctcttagtggtatttttttatggagttttctcactttccaagtataccgttcacagaaatatcctaatatggcagcttaattgctgaaaacttattatagaaattgcctttaaaatacagaattaagatctgtcttcttactcctgtttaaaattttattagaaatacttttattctaatgacaccaataacatctgaagcttgacgtgaagtagagacagacgcagacagtacataggtaggagagctttatctcaggtgctaactttagtttgtatttgtgaagggtgtgtggattggtctgggacgatgcctctggagctagctaggtgttttatgggcatagggaataggacatttctggcatgggtttacatcactccagatgcagccattctgtagttgttatctgaatcctgggcagaatgtaagcaggaaaaataactaggtgcttccatatgcacagggcatcagcagtgagagtgcagccttatcttcactttcttagaggcaaatgctcatccttttaaacaagtttatttagttggctaaatccctccatgattcattccctcagacaaccaaccaggaaataaaatcatagcaacacagaaaaggaaagaatagaattcgtgagaccaaccacgaggcaggactcagaaaagacacaatattctgctctcatctgagataggtaaagtttaaaatcattttaaaaaactaccataaaaagaagtaaagaaaaaaagtaaaatgttcaaagatcaatctaaaagacattttttttaatttctttatggtggatctgaaaggtcacttctatctcttttaattcattcacatgtggaaaaatagtccaagaagtaagatgagcaacacagtgaagaaagatggcagacagttatttcccaaggggagaggtttatcttcagatataaccttcatttctcagcagcgataaactcctgtgatgggctctccatctcctttaataacagtgtggaaagttggacactgagttatggtgggaactgtattgggtcctttgttccccaagcccattaattctggcttccccaagactgagttgggaaattctgtgcggagagctccctctgaagcaggcctagccttgtaggtgtacaatctggaatctttttgcttcgtggactcagtgctcagcagccttccactgttggttgttggttgaatgcctgccattgaaactggctaagacttgggcatacctggatgtaattccttgggtctcctatcaggagaaccctccaggcccatcacagacaactcacagaagccaggttgtctggtcaatgacaccatatggtaaaattctcctcctcattcacccagtaaggagcttccctcccacacttcctacaaactcctgtcaacaaactgggaagggagattggagcccatagcgcagaccactctgacaggtgagctgtgatgtcaagctgcaagacccagggatggcatagtgtggagagtgctcacctcaggcatggtggcatatccatgaggatcagtcactcaaggtcatcctagctacatattagcactgaagccagccttacccattgccatagagttactgctttctttgcatatttggcaggcaggggtctcttgctcagttatatggtcacagaagtaactcattaactttgaaacaagggatccgttattttaatctaacacaggacccacaaatgatgtctctgaaactgctaaagggtgatgttgggccatgggaccctctctctctctctgtgtgtggggtcattccttaattagattatttttgtaatttaataaaatgtaaagtggtggcattaaattaatacattaaagcaaagcctgacagagtgggatacaacnnnnnnnnnnnnnnnnnnnnnnnnnnnnnnnnnnnnnnnnnnnnnnnnnnnnnnnnnnnnnnnnnnnnnnnnnnnnnnnnnnnnnnnnnnnnnnnnnnnnnnnnnnnnnnnnnnnnnnnnnnnnnnnnnnnnnnnnnnnnnnnnnnnnnnnnnnnnnnnnnnnnnnnnnnnnnnnnnnnnnnnnnnnnnnnnnnnnnnnnnnnnnnnnnnnnnnnnnnnnnnnnnnnnnnnnnnnnnnnnnnnnnnnnnnnnnnnnnnnnnnnnnnnnnnnnnnnnnnnnnnnnnnnnnnnnnnnnnnnnnnnnnnnnnnnnnnnnnnnnnnnnnnnnnnnnnnnnnnnnnnnnnnnnnnnnnnnnnnnnnnnnnnnnnnnnnnnnnnnnnnnnnnnnnnnnnnnnnnnnnnnnnnnnnnnnnnnnnnnnnnnnnnnnnnnnnnnnnnnnnnnnnnnnnnnnnnnnnnnnnnnnnnnnnnnnnnnnnnnnnnnnnnnnnnnnnnnnnnnngggctcaggagccagccagagtaggcagattggtgacagtgagaacagtctcaggtaacaaattgtgcaatgcctgaggaatgactgctaaagtcctcctgtgaccttacatgcttatgctcataaccccccccatacacacacacacacacacacacacacacacacacacannnnnnnnnnnnnnnnnnnnnngctgtgggatatttgtgcactgtgaaaatatattgctgtgatttggtttaataaagaactgaacgaccaatagctaggcaggaggtataggaaggacttcctggcagagagagaattgagaagaagaagaatctaggcgtgcagaagatgccagtgagacactgaagaggtcggacatatgggacagagtcacatggtagaatgtagattaataaaagcaggttaatttaagttataagagctagtggacaagcctaatctaatggccaagctttcacaattaataagaaatctccatatcgttatttttgggctggtggttcagaaaaagtactattacacacacacacacacacacacacacacacacacacatttttaaaatcatgctccatttgttgtttgctagaagtgcccacagaatcactggaaacattatattcctagccatggatgattatgggaaaagacacagatgaaggtcagccaatagaagaagcacactgggtggtgtcaggaagagatggacacacacaggctccctgtgctcccccacagagccaggacttgctgctctttctgtccctgccactcttctatgtgacagtgtgcaggaatcattcctacccaggaggctttggtgtcacatactctgtgtgtggctgaccttcacactctggcattccagactggagcttacacctgcagggaagagtttcttcccctgccctcctgggttcattgtctgagcattttgcaaattaaatgacagaaagactaattaataggagaaatagcagatttaattacatatattggcatgggagtttccaaagaaccaatgcaccaaaaggcagttaaacttagcccctatgagcaactttatttttaaggttgtttattttattttatatgtatgggtgcttggcctgcatgtatgtcatgcctgtgtaccgtgtgtgcttggtgcccatggaggccagaagagggtgttggattgcctgaatctggagttacagttggttgtgagccaccatgtggaggctagaacttaagcccaggctcttaactgctgagcgacctctcctctccttgctaagatactactttaaaacagagaaaaagaagaggctctttgcttctggggaagagggatgaggctctggaaggaaacgtggcaagtagggattgtttagtaaggcctattgtgactataacagtccttagtctttggggtagctccttcttggtttgttagaggtagctctctttagaaatggacatggatgccgcgctatcagacagaaaggaggccagagagctcattgctttgaacctcaaacaatcctgatgttagagaggtgtattttgagcttctatctatggatctccagcacatttggtgtctctagcttctgcagaggtcagaactgatacactgtgtgtcaccttaatccatgctagatgtccagcatcaaactgccagcaaagagactcctgtgagccagagcattctaggtcctctgcagggcccaaggtcaaaggccagtcttgtctatggagaacttcatttttttaaaaaaatatgataatcttccaatatttaccattcaattcaaagttacaaaactattaacaccaatcacagcccatcagtaccattctctcggatagtggaatagagagtcaactgaggagtttcacgagccagttaccaaacatggacataatcaaaagttaagttttaaaaataaagttaataaaatgaggatggaaagacaggaaattaaggagacatggggtgagttaggttgcagcagctcaccagctgagagtcaataattcagtacagttaacagcatttgctgtggaggtgcctgacgaagacacaacactccttttatgtggagatattttcaaacaagaaatgttaaaatagcagggagccatgtttaaggcttgcatgcccatgaccttgaagtatgctcttaactcctttcaaagctgtaaatctgcaattttctgggaatttcatgaacaaagctattaactttatttgtagttgtttaaaaaagtggtctaattgccctgtacaccctctgtgagctgcacctttaccttgacaactgtaatactatctggagtacctcaggaaccaccctaactctcatttacccaaatgaaggcagggagagagggagagagggagagattgtgggggagggaagagagaggtgcagaaatactttgaacaatgtaactccagatgtcacctacatggcctctcgtgtgtgtgtgtgtgtgtgtgtgtgtgtgtgtgtgtgtgtgtgtgtgtgtattacgctttcctgagtgcctcttattttgtcaatgcccgtgctgaatgtctatgccaaaatctcttaacaaactcaagctctgcttcatactgacccatcctgagattcttttccatgttggagaatcccactttgcccagtagacttctctgaaaagatctcttcaagctacatctgtgtctcagcttccctcttaccctgctgctaacaacaaatgtttgaagttttataattttttaaagtcaccttattattcgtcagctcctggtcttatttacagacggtttctgcctgttgagcaccctgtagagtaccaccacgaggcgctctctgtgtagggttgccacctctgtagcacacgatggacccgagtgagcacagtatgatcagtactatgaccaggaatttttttcatctttgactttgagatacttctttctgctggtcaagtggttacaagaactgttgagaacatgttacaggccgtgacaacactgggccaaatgtctgataaattacctcaaaatacaaagtttgtatagagctcatgaacccgacccaagagttttacctaaggatctcactcttcatacaaccttgttctgtgtgactctggatttaattttaagtgtaaatttatacaatggcatttcagtgcttctgacattttgtgtaaattgtggaggatgtatgagaaactaaaactagcattttgatttataagtgtaagatataaatgtatgcatgtaacacttgcctcttgtgaaaacagtgttcttttctgttgtgcataatgatttcagtgtgagttctaagacaggggatgtttacttgtatgtggcagcagtttcaaatgcagagactccagtccttcccattgctggtatggggctcagggtgttcgttcccaggtatggttccttggtacactggacaaaaagagcctcctgactttgcctgaagctggtcacaagactactctagtcagagacattcaactttaaggaggaaggtttattttatctcatattttaccaggttgcagcttccgttcagtggatcccagggctttggatcagtcacagtgggaagtgtgtggagggacaaaaaccctcacctaatggaagaaacaaaagagaacagagactaggggccgctcctccttaagggaatgcccccattgacttcacgcctctcctctagacctgacctcctaaaggctccttcccctccagatacagccacacactggggaactaatctcacagcacagaaccgtgcagaactgtcactgaacatggcagtgaagcaacgagccagcatttaagaggtggcaggggtgtcagtctccaaatgtggagacactaaaatgaacttgactggattagtgtggggagcaggggaagccctgtatatgtgagtgaggagtgtgtatgtgtaggtgagtgtgtatggtttgacatgggcacctcatgttaagggtcccaaagcctcagacctaggggaaatgggaaagccttccctccctatcggaatgtgaatgttgacagcgtgtgcagaaaatgaccagcatagctttcttccccccagatatttgtgggctgcaggttgctccccctcagagtctgctcctacagagattagctaaacctgtctccttgttcagcagtatataatcaccccaactcttgtcaggttgcatgcaataaccctgcctccttgtgcaacgatccccctctctttctttctatctatctaatctgtatctgtctgtctatctattgcactgagcttttatggtgcagtgttttctccatcagagagctctccccacctgatcccagcttttctgtgtgtccctgtgtctgcctttttttcattccctcactgccccatcaggacaagttcttggagctctgccaggatgtggcagatcagccttgccaagtttccccggttactgccattaactcacgccatctatcctatcatgatcctagcccaggatcttctattctccagcaaactgaataacacaaacaaacccaaacaaaaagccaccaggttgggacatataagagaggttcacaggttaagagtactcactggctgctcttccaaggaccagagtttggtttccagcaccacatagcagctcacaactgcctgtaacccaggttccaggggatctgacgccctcttctggcatttgttggcactgtatgcatgtgatgcacagacattcacgaaggcaaaacacatctattcacgtaaaatataatgaaaaaaaataccaggttcaccagtctttgggacttcatttctgtaatctcctgggtcttttaagtcatacattaaatcagtttatagccttttcttgttaatctgccatcgactatgtggacccagataagagccaaaaagttcaggaggaaaaagatatttcctttcttctaacatgccatggtgcagtgtccacacatgtgcttttgtcctgtaggtgcagggtgacagtgtttgctgtctaagcgatggaatattaatgataagagatgtttttgagacttattcctgtttgctttgtgaagctgtcgttgcacagtctcaggaatggaaagggaagtcagtttacctccacgtaaagtccgtgtcatctcctgcctgcagcctctgcagccaccagtctaagacccaggaagaccacagctactactgcagacatgtgacatcacagactgttctcacttgcctggctaggtattgggcaagtccgggagcacaggttgcctgttgctgacaggattgtcttgaagaagagataatattcaagttactagatattaagaatagatattttaaagtatagttgtcagtcattttgctaaatttctgcctttgtaacattgtactcaatctcctgtacataacctatctgattagggagtattgttaggatggaaaaatcacagtggactgtgttcaaggaaaaacaaattattggatgatacttgttaaaacacagtcagactgactttattcaggataatggtggcaggcatagaaccatggcaacaagatcttgctgtggggaaagggatcaagctcaaccctgaatacagccaggagtcaagcaggaattggcattcaggagctgtgtgtgtgtgtgtgtgtgtgtgtgtgtgtgtgtgtgtagtgtcattggatgaggtattgctaaaatactatatcagagttaagaaggtgctgttctctgaatgcaaattgtacccccattgtttgaatggtggtgctcttcctgcagattgtgaatcctctaggaggtggagccatactggaggacgtgagccagtgtggggggttggaccttcctgtttgctatcccacttctgtttcctgctcatcttggatacgaacaggatctcgacaccttcctttcacctccctcatttttcctgccatgatgggctgcgtctccccacgctgtgagcccattcaagcccttcctcccttttgtggcgtctccacagtgtttcgtcacagtatcaagaaaagtaatgtaagacccccccccccaaagctcaggcctccagggtctcagcccaggacctcagccaccccaatccctattcggagtcaaaagcttgatgcaaactgcacgaggctttattatagttgtttaacgagctaaccccatgttagctctggtctttcacccacccgccatggcagatggctagcaaagacggctcgaagcagctgcatagagatcttatagggcagcataaggggagagtctaggggtatgcacaggctcaggattggtgtgcccccaggctcggagggcttgccctgtgttgattgggcaactggttgttatggcccataggccctcccagggtggttgctatgctctgcatgtcattgctgtgcacttgtctgtaaagnnnnnnnnnnnnnnnnnnnnnnnnnnnnnnnnnnnnnnnnnnnnnnnnnnnnnnnnnnnnnnnnnnnnnnnnnnnnnnnnnnnnnnnnnncgaaagggggagctggtcccttcggtaacagttataagaagtttctgactgaactgatacaccaggataaatctgtagttgggtagtcaggcattgctaaatgcatggtgaatacaaccctgatcaaatattcaggatcatcaaacttaaagctggatttagactggattttgtagggctgtgcatttcatccagggtcctaggctaagcttatgaggtctcaataaggtttggtaaagcaaagaatctttgcagttaatttgaattcagtttttatgaaaatattgacttgcctttgatttatttctagtgttcaggaatcctgttcctaagaagtgtgtgaatgactctgcctgagcctcagaggcacttctggaattatttgttttacaccggctctgggtggacacagatctctgagaaggtagtattcctgcaattaccaagatcttaacaataattggatactaagtagcaagatattaaatctaatttccttttgggcctctctgttagctgagtgttttgtacacagagagaggagcggccaccttgatggccgctgctctctgataccagcactctatggcatggagcaggattgggtcaggaaatgaagaggctccaggagaatcttcctgcgggtgcccctgggctcacaatacatattgtgaacaatgtgttgggcactggagttgtcatacatcgaaacacacttattacttccaacctgtggaacttcaagttaatctgaacaccacagtgtcagtggcacttcctggagcttcaggaataccaaacccaaccctcagagtgtgttttctgtgcagtagatggccctcacaccattgccaaactggaaggctccaggctgaaccttgtaagtcagggatcatcttgattctgaatgaactccaaatcatccttttgaagtaaagatagtgaaaatgtcactgaacccagggtgtagtctgtgcttcccgaatgtttctcccctctttggagtctcagctcaggtcactctccagcaagatcataatcactgacagctgattttgcttcgcctggaaacccaaactgccaagatagggcaggagtgcgtagaggaagtgaattgccgtagagtccattctcggagtctctctcctggttttagggtattgtgcctagatagctcttgttcgtcacacacacactcacctatcaccagtgaccatttccacagggcactgttactgtttggctgttctagagagccagttatggtcgggaaatgtccctcttgtattgtttaccactcccaacacacatagtcaatctgtctctcacacacagactctaccacacacaccagtcagtttctctcacacacacagtctctcacataatacacatactgtctcttatacacagatacaagtcagtctgtctcacacatggtctctctctctctctctctctctctctctctctctctctctctctctctctctctctctctctctctctctctctctctctctctctctctctcagacacacatgcgagcacgcgcgcgcgcgcgcgcgcgcgcgcacacacacacacacacacacacacacacacagaatgcttgagtagctttatgcctcttcccttccttagcacagtgtgtaccaggtaaatccattttttaaaaattactatggaggaagcaaaagacacaagtgtgtggggtctggctagggcagacattgaggtttagatgttctgggaaagctgtcaccaggactcaggatttcaactttgcttctctctcatgaattttaattcaccaagaaaacaaataataaataaaacatcaaaagaggcaaaatgggtcaggtcttggactgtcttcctgttaatctgggaactgctgaattaagtgctcaggtgttaaaaattaaggagccattgggaagcacaaagaacaaattctcctttatgtttcaaatttcttttcttaagtttcttattggttgttgtttgtcggtttgttttaatggtgactttattttggtctggatgtataaaatctccgctaacttcagcaataaagtcacgtcaattcacaagtgtcctgagagaattaacaggcttttcaatactagggaattcagtgttactccggaatacctcatttatttacatattgtgattggcattcaaaagtagaacagtttcgggaaagaacaggaagtttctgagtcagaggcaatgccagggcggtcagctgttttaatttgtattgacagagccagggcagcctcgcatgcactacccaggagacaacagtcacactcaagagatccagtaagacacaggtacaagtagctagctgggccaaggaggctgaggcaggaggatttccatgaggacagcctggcttccatagccattgccgggcctgcttgggcgacagagtaaggcagtgtctcaaaaccaaaaccaaaagaaagccagaagtgatgtgttcggcgcctctctcattgcttaagagtttaaaggaaaaaacaaaaggaaaagtcnnnnnnnnnnnnnnnnnnnnnnnnnnnnnnnnnnnnnnnnnnnnnnnnnnnnnnnnnnnnnnnnnnnnnnnnnnnnnnnnnnnnnnnnnnnnnnnnnnnnnnnnnnnnnnnnnnnnnnnnnnnnnnnnnnnnnnnnnnnnnnnnnnnnnnnnnnnnnnnnnnnnnnnnnnnnnnnnnnnnnnnnnnnnnnnnnnnnnnnnnnnnnnnnnnnnnnnnnnnnnnnnnnnnnnnnnnnnnnnnnnnnnnnnnnnnnnnnnnnnnnnnnnnnnnnnnnnnnnnnnnnnnnnnnnnnnnnnnnnnnnnnnnnnnnnnnnnnnnnnnnnnnnnnnnnnnnnnnnnnnnnnnnnnnnnnnnnnnnnnnnnnnnnnnnnnnnnnnnnnnnnnnnnnnnnnnnnnnnnnnnnnnnnnnnnnnnnnnnnnnnnnnnnnnnnnnnnnnnnnnnnnnnnnnnnnnnnnnnnnnnnnnnnnnnnnnnnnnnnnnnnnnnnnnnnnnnnnnnnnnnnnnnnnnnnnnnnnnnnnnnnnnnnnnnnnnnnnnnnnnnnnnnnnnnnnnnnnnnnnnnnnnnnnnnnnnnnnnnnnnnnnnnnnnnnnnnnnnnnnnnnnnnnnnnnnnnnnnnnnnnnnnnnnnnnnnnnnnnnnnnnnnnnnnnnnnnnnnnnnnnnnnnnnnnnnnnnnnnnnnnnnnnnnnnnnnnnnnnnnnnnnnnnnnnnnnnnnnnnnnnnnnnnnnnnnnnnnnnnnnnnnnnnnnnnnnnnnnnnnnnnnnnnnnnnnnnnnnnnnnnnnnnnnnnnnnnnnnnnnnnnnnnnnnnnnnnnnnnnnnnnnnnnnnnnnnnnnnnnnnnnnnnnnnnnnnnnnnnnnnnnnnnnnnnnnnnnnnnnnnnnnnnnnnnnnnnnnnnnnnnnnnnnnnnnnnnnnnnnnnnnnnnnnnnnnnnnnnnnnnnnnnnnnnnnnnnnnnnnnnnnnnnnnnnnnnnnnnnnnnnnnnnnnnnnnnnnnnnnnnnnnnnnnnnnnnnnnnnnnntcctcgtgttctccctgctcagtctggtcctctagggtctacgtttgctcctccctgctcagctctgttctcctggctctgccccatgtcccctgggctctgtgcttggtgtccctggttctgtcttcagtaccttctacttggctctgggtcctcccggctctgactaatgttccgtcagcgaagccccggcttctctctgacagaggttctcggcaatctgccccaggacctcttcttccctccgtctggatcctcccggttctggccctgatcctgttgcgccaagctctgtccggagtcctcctggctctgcctctggttctttgccagggttctcaaccctgtaccgttttcttctggctctgtcttgggttctctccgcgctactcagggacctccccgctctgccttggtcctcccagctaagcctaggttctcccgcgcttcctggcccctagggctcgggctgcggagttgggacccagtttccccagagtctgggctctccctgctaggatcctgggggtttagggctggtggcccttccctatccttcccggtctactcatggagaccggccggttccagagggcagcgatgctccaagctattgcttctcccgggagcgggggtgttggactgttgggcagatgaggagtggagggaacaggatcgggtggcctagaatatccctggagctgccaggctatgagtgttccaggcggaagctggggagaggggttaggtaccctagtctgagtaccaggctttgtgtactgggccgctgatagcctccctaacccgaacatctccaatcccagcctccacatcctgaaactccgcaaccccnnnnnnnnnnnccccagcctctgagtccaccgtgtgggattcacactgagaacgcgcaaagtggtgggggacctgcctggggtcacagagaaacctttgcctagctccggaatcatgactcggcgtttctggtgtgaagtagtggatccggacgcgtttgtaggatggggtgtccgcttggatttagaattctggggaaaggacgagttggagtcttaagaggtgaacgccattcagtgtaacttgactccgcctttgagctggtgtgagtgagtagcacagaacagctcacagggtattagtcccatattaacctgctttccaattcttgtcatccgaaccatagttcgtggcactaatctctgggaacagttggcaaagtgtaacagtcagcgtgggccttcaggcccagggctttggagaggtggccccatgacttagaaaaagaagcctggcagttggcttttcacgtagttttttcaaataaactaatgttttaaagacggcaagaaaataacacatctgactcccaaggggatgtattataaacatttatctttggaatgttgtgttggttttcaacccaaggatagccttagctgcagtttctccacctttttaattttccaagtgtgtgtgtttttttaatcttaaaaataggaatgcttccttttacacttggtgggctttcatggaatgggtgaggctgttgattaatttgaaggtgtgtaagctcacaacactgcagactttttacagctttgatccctggctggagcagtttccatttaaagggccagggttggatgcctgctggaggatgggtgtaagtgcaaggtgctggctgtccaagtgtttttaatagttcctaataggagttctgccttggcagaggaggaaggagggagaactgtgtagcaactccaccttgatatcactagcttgacttcacacacacacacacacacacacacactctgtgggaggtgttagtgaagaaggggaaattggctgctttgataggcaggggtggcagagtagggaaaggaggaatatacaaagtctttggggtattcattgtttatgcacagcagtttgaagtcaaagacattgctctttgatgtgggttgctttaagagtgctggctaggtttgtttgtttgttttgtttttgtttgtatgtttttttttatcaacttgacacaagctagagtcatctaggaagacgggggaagctcaattgagaaaatgatgcccccatcagattggtctaagcctgtgtggacatttccctggttaacgattgatgtgggagggcctggcccactgtgggtagggcctcttctgggcaggtggtcataggttgtaaaaggaagcaggctgagcaagccagtagtcagtgttcatccatgtctttgcatgttcctgccttgacttccctaaatgatggagctgtggttcagacgtgtaagacaaataaacccctttctccctaggttgttctaggttgtggtgtttatcacagcaataaaaagcaagtagaaatacagcgagtcctctttttttttttttttttaatggaccaattgagttgtgagtctagagatcgactaggtgtgactcggaataagttaccttatctgtaagagaaagcagaccagtcctgttccacatggtcagtttcaatcagagtagctacctcttcagtagtcagtgaggtgcccccccccccatattctagtacagtcacatgaactgaaggcccttgaatcttcagacacttttaatagttttcatccctttcccattcctcctgtttttgttttgtttgttttgctttcctttgtttgtttcgtgaaacaggctttccctccatatcctgggctagcttgggattcactatgtagcccaggatagttctttactcatggtaggtcttgtgccttggcctcccgagtgttgagattacagattcagtgagctgccgtgtctagttaggtctgtattacttgagcctgcaagaagggatggaaaactactttgatcatttggtatgactcaagcattggcctagtgtcctgactgttttttgtgtcaacttggaacgagctagagtcatctatgaggagagaacttcaattgagaaaatgccttccgaatatggggctgtaggcaagccagaaaggcattttcttaattagtgattgattgatacaggagtacccagcccattgtgggtgttgccacctccgggctagtggtcctgggtactaggaaataacactgatataatgtgtgggacccctctcccccctagatttaaccagctttttcataactattttatttatcttggtgtctatttagttctctgcagttttatgccaggtgtcaatttctgagattctactgtagttacaaagcctaggacacattcatcacgtggactctacacttcttgctcatgatagcaaccacccaagctctagcgtctaatccacaaactcccaccctgaccatgacaaccactaagtctccatctctataattttatcattttgatgttatgtaaccagaattgctcagcatacactttattgagattttttttttatcttagcatttctctggagcttcattcaggtgcttgtgtgcaacgaagagttcattccctttcgcttctgagcgaccatctattctataaaccacccaaagtttattcgatcatagactcccaagtcaaaatataaacccttttctttctttttgtttagaaagtttatattcttgatatattaaatgtatgtcacatactgagatagaaactgtcttcagaacagcataaccaatttatacataattcttttgttgggcaaatgcttgtgtataaagaataacagccacgctgttattaataaagagcctttcatgcttctcacataaaaagaaaggtgaagttggctgaggaaaaggttaccagatcatattagctgtagagtctacagccgtgaaacaaggtgtgacaggattgtctactctatcactttagctctcttgtaactgtttctagaacccctttcccagggtgtgttgcagaggtttctttgtccagccaggtcccgtcacttcagcctcaaatgaacacacagagacactgtattaattataaactgttggccaatagctagggcttcttattggctatctctgtcttaattattaacccataactactaatctatgtatttctacatggccttatcttattggagaacaactggtgtgtccaatcctcccagttcctccatgttgtctcttctgcctacccttcccagaattctcctcgtctcctagtcctgcccagcttcctgcctctactggctattggccaagcagtgttttattcatcagccaataagagagacatatttacagaaggacatacctcatcaagggtggctctgcattagggctgaccccaggagacatttctgagaggtttgaaaggtagagatgaagcagctgtgatcaggctgagaagattggtgtaggttttgggggctgtggaatcctatgcagattcagcaggaagttttggctgttcatggtgacagcagtagctcaggtcacacacaggcctccagtctcccctgagctcttcctcagttgccagggtgtctgcacagctgtgagaaactggagtggaagagtcgggccttctacaggttcaccttgtcaaggtggagagacagtgtactgtagcatagtgtgtctctggttctaactcattcttgctttccctacttcctttttcactgacctctcttccccactggctgttttgttggcttccaaacccaaacatcacacttgcgtagatgaggtaatggtgacctgtcacatgactatagtaaatgttttttttttttttttccagattactcctgggggttctgcctaagtgttgcaaacagtcacctctgccccttgaattgctcagtcttgtcttaggctcgtgaacaaggacaggcaggaatatttttattaaatatatttaatgggggagggggacattacacagtttccactggcttgtgtcctgtaccttcagtgtattcaccccatacctttccctttcttctggctgcccctcccccttgtcccttactggcttctccagatagtgtcacttctacctgcatgttatatgtgtgagtgtgtgcgtgcgcgcatgtgtatattatatatatggttttatgtctatataaaagatatacaagaggaaacatctggtatttgccttttctggtctccagttgcctccattttactgtgaaggacacagtgtcacttcgctccctggtcatggcctctgaaatcaggaggaattgcattaaacttctctgtagacactgaactgaaacagaaccgaaggctacagtgcccgcaactcccccttgaaaaactgccttgattgatttaagaggtacttagtgttttcattttactcctttcccctttcctcttggggagaggttcctgtggaaatttccattcagccagtgagtggagcctgattcaacaatgaaccaacccgtggtcttctgcgctaaagatggggaagctgaggctgattacaggaccttaaactcacggtttttctttccatgtttaggctattagatcattgtttgctataaagttttactgaatgcctctgaagctaacataaatcataagagtgacgtgggtggcttaaatgtcagagctaaaaaatagaaaatgttaatctgtgtggctgtggggacctgtgatgctttaatgtttggtaatgagagattttaccagttctcatcttttagtcagagccttctgccagctctgagattgtgcaagcattggcttccatggcttatacctgagagccctgaaatgttcatttgggtctgcctctgctgatctgacttccttgaggcctctgtctctctggactgctttctatatactctagaacagtgagtaaagatggcctgggatacttggttaaggtgcccagacattctatgatggtcacacaggcaagggaaaaaaagatttgaagggagtaaagtctctatgggaaaaataatttttttaaaaatgaaatttctgtattaaactaagagatccctggaggtagagattgtgattgtggtctcataggttagtctagacctcagtctggttgtataggaagagtaggaaaggagagaaacccagttttggattgtagggtttttctccaaatttctccctgaaggaaatcataggattttctcaaaaagcagtctgtttttatcaacaaatgtctttctattttccttgcagccacacacttatttttttccagactttgagtctagcccttgctctttatgaggactgaggaatgtttggtcatgccaaaggaatggtaatgtgtctcttcccattgataagacatggtggcttctgcctgcaaagttctggactcctgcctcccacgccgatgtctaggctctcatttccacccagtaccctggagacctggcttcttcacaggtcagatttgctgctgctgagggcctctgcgctgggcagtcttctttggaaaagcccttccctaagctgcacagggctggctttctctgtaccttcagtatttgctgagacattactttgtcatgggggcctgcccaggactcctgtctgaaccttctcaacgtttcacctttactttcttactctgatctgttagtcgcttttccagcactgtgacagaatacctgagagtagcttacagaaggaaagtcttattttatctcacagttctagtctatggttggctggctctgtggtttctggggctatggtgaagtacagcagaaggcttgacagagccgagctgctacctcatttagcaggaagctgagagtgagatagagaggagcccaggaccagatggaactgccaagaaccccatgcccggtgatcaacttctccagctaggctcaacctctctataacactatcgaattactagtccaacaccagaaaatccatgcttaggtcagagccctcatgatacaaacacctcccagtggtttggtccaccatctagggaccaaacactcaacacaagaaccttttgagaggctgttctcatccaaaccctctataacccccactgctatctgatatcattctgttgttgttgttgctggtttcagtgttctgccactgctctgtgagctgtctataacatgtagcgctttacttggtttgcaaagtaggacttagaattagacatggaatcctctttgcgtaggagatctgcttggtttctgtcttatttaaaggcttttgttttaagtgtgtgtgtgtatgtttatatgtgtatgtgtgtgcatctgtgtgtctctgtgtttatgtgtgtctcagtgtgtgtatatctgtgtgtatttgtgtgtctgtgtatgtgtgtgtttgtgtttgtgtgtctctgtgtatgtgtatgtatgtgtgtgtgtgtttgtgtctgtgtgtgtttttctgtgtgtatgtgtatgtatggatatgtgtctgtgtttgtatctgggtgtacatgtgtgtgtctgtgtctatgtgtgtgtgtctgtgtctttatgtgtgtatgtatatgtctctgtgtgtgtttatatctgtgtgtgtctctcagtatctctcagtgtgtgtatgtctctgtgtgtctctgtctgtgtgtgtgtatttgtgtgtctgtgtgtgtgtttgtgtctgtatgtctctgtatgtgtgtgtgcctgtgtgtcttgtctgtttggtgtgtgtgtgtatgtgtttgtgtgtgtgcatatatgtgtctgtgtatgtatgtatgtctgtgtacatatgcactggggcacagcacctgtagagatcataacaggtagccagatctccctgcagtgatagattgtgaactgcctaattgggaacccaactcaggttctccagaaaagcagccaagtactcttagccactgagccatctctccagcccagttttctgtcttaatttacctttctccctcctctctcaaagagaaaagtggaagcagaagggggatttccttggacattgcagaggatctctgagggtcctgtgtactgaaggtcaagggcagccttgactatagaaggatgattgtggctcacagttataatgttgagagaatgacaatctttagtctggcaccatctcccccccacaccccaggatgccactgaagcacagatagttgcagaaagcatgttgcaagttccagacaggaggcaggaggctggggcaaagcccagaagggggttctcctcccctctcccctttgggggcttaagatccattcataacaccaccttgctttctataatcaaatggagcacaaggaactagcctatccagcgatctagatttcatctggtgtttgctttgtgttccttcagagaaaccttctttctaaactcttgggatttctcaatgtaaggaatttcatatgcttcagggtggactcatggttcaccatgcttgaggagcaagtgacgaaaaaaagaccggttatgattaaagggatgggctttgagctgtgtgatatttgctctaccctcccatttgaagagggagatgggattgaagtcctgtgtcaatcaagtgggccaaataatgaagccccaaatcataaagcccccataaaactctggagctcagagtttgctcacacttccagtaggttctctgccaccctgatgctctgagctgggtgcatcttgaggcttggcaaatgtgtgtgtttaggattctccaggcatccttccaggcgtggctagctccccttggtcctgagttttgttcttaatacatgactgtagtacagcagtttccttggttctggaaggccttctaaagcactggagaaccagagagaaatgaggaaacactggttttatagtaaccggtcagaagcacagatgctttggggatatttggagtcaggagtctcagaaggactctgcttggcctaggctatttcctgtaactttgggtagtccctgacagaactgcaatgtgcccaggtatgctagggaacacacccttctcaaagaaagcaaatgcaaaattaacagtgtagttactactgccactaagatatgtgacattgggctcttctagttatttgctgattctctctttcctgtgttgtcaccagtgttcttgcccaatgtccctccctttagtgtccttccctttagtatgttattactcagaatgccaaaaagacagtaatggtggttggaatctctcctggggagtagctttctcctgctgagtgaggatgggaggcccgagctccagtcagaactggattttctccacgctgtggtaccggtcagttgcagagtttgtttcttcagatggatgaggtgatgatgatttgttgatttgtctagaactagaaggatggaagaagagagccagaatgatcgagcatctatgggaatcgcctgaaagggaaaacaagctgagccagatgttatttattggttgattgagctaagatgaacgtggaaaccattcccaagcttgacaactgcagaacggctagaggtggctatagggaaacaacagaagatgggcatgttctgtgtgttgtactgggctgtggacacccaggaaaaaaataccataaatggtgatagagttggggtaatagctcagaaggtaaaatgcttgcctcgcaagcatgaagaccccgagttcaatctccaagaaccccccccttttttttaagaaaggagaaaagagaaggaaaaggccaggtatgcttattagcccagtactggaaagacagagacagttagatctctggggctcactggctggcaagcttagcctacgaggcgatctgtctcaaaaacaaggtggatagcacctgaggaatgacaactggggttgttcaaatgcacacgcatccatatctctctgcatacatgtacacatgcacaaaagaaacaatgataaagggggtacacttacccccgcccccttcctgattgctgttttgtttttttgttttttgatcttaaagaatgcttgctgatgagcacactgagttttctgttgaacctgttacccccctcgtgccttcgactgagctttgagacccatgtctcgtagccctgctagttcccttcctgggtgcagatctcaggcttcatctctatctgctctatcctgagatgggatgggagctgaaggttgcacaaagaagctcggtgaccactggtaaccccaggaggcctctgtttagggagatgaaagtgtcacattgtctttagttcattgtaattcatattccaggcatctgcagctgcctgtactggtatcttctgttccaatacagtcctgctccccaccccaccaccaccccccccagaggaggggggcaagaggnnnnnnnnnnnnnnnnnnnnnnnnnnnnnnnnnnnnnnnnnnnnnnnnnnnnnnnnnnnnnnnnnnnnnnnnnnnnnnnnnnnnnnnnnnnnnnnnnnnnnnnnnnnnnnnnnnnnnnnnnnnnnnnnnnnnnnnnnnnnnnnnnnnnnnnnnnnnnnnnnnnnnnnnnnnnnnnnnnnnnnnnnnnnnnnnnnnnnnnnnnnnnnnnnnnnnnnnnnnnnnnnnnnnnnnnnnnnnnnnnnnnnnnnnnnnnnnnnnnnnnnnnnnnnnnnnnnnnnnnnnnnnnnnnnnnnnnnnnnnnnnnnnnnnnnnnnnnnnnnnnnnnnnnnnnnnnnnnnnnnnnnnnnnnnnnnnnnnnnnnnnnnnnnnnnnnnnnnnnnnnnnnnnnnnnnnnnnnnnnnnnnnnnnnnnnnnnnnnnnnnnnnnnnnnnnnnaaattacttcaagctcctgactgtgagagggaggaggcaaggagctaatgccctttttgcctttattctcctttggtgtcagattattggacgctgggacctttcttgggacctgatgtggcagtcctggagaacagccagtctgagtgctttgagctcatgcccccttctcctggtcagctgtgtaggaagacagctggctgaaaagaggaaggggagtctattaaactgagaggcttacagacggtcagagattcctgttaagattatttcagaaaaaaaaaaatggtcctactgcttgacctagttctaaatgagaaataaagactaagccaaataaaatgagagactcttagagctgaaaaggaaagatgggattttctgactcccagtataatttagattcatttgtttactcaacagatttcgtttagagtctattatgtgctgaatgcaatggatttcagtgatgaagagatgttagcttctgaaatctctgaaaaagtgctcataactcctgaagacagttgttaatgagtgcctcatggaggcactgtggggtgacctggaacctgagacactattctggttagatggtgttcttggccccatgctggatgccacctgtagttggtttctcatcctaccctccagttcccaaataaccattctgaggctcaatattaattagaattgtagttttttaaatgtttgcaagctacattggggttttctagaagcactgaactcataggatgtatgcatagtatttaaaagagttgttgggttgggttatgtgggagaggctaggtagcaaggaccacctccttggtggagaagctgagaacactgtagctgcacagtccctgaagctagatgccttggcagtcccaatgtgatgaggcctggaaggtccctgcagagctgctgaggctgaatcctcattggaaggctgaagaagctacgatgtcagccaaggactcactcaggtagaagcagaggctgactagtgctgccttctccttggatctctttgtgtcttggagtctcttttgaaaagtgatgcccaccttgaggatgagtgtctcccctcggccctttcaggaaacagtgccatggacaggccccgagttatttccccttcgtgactctaagtcccatcaagttgatgacagtccagacaggcttctgtgctgctgctttctcttagctgaagacttcatggttcttttcctctcaaggttggaacctcagctgctgaaggtgtcagctgacccagtcactgaggggcggagcttcggttctttggtatatacagtacctcacgttgtagctccatgagttgtaaaaatgaaaatcggaaaaaagagagaaagannnnnnnnnnnnnnnnnnnnnnnnnnnnnnnnnnnnnnnnnnnnnnnnnnnnnnnnnnnnnnnnnnnnnnnnnnnnnnnnnnnnnnnnnnnnnnnnnnnnnnnnnnnnnnnnnnnnnnnnnnnnnnnnnnnnnnnnnnnnnnnnnnnnnnnnnnnnnnnnnnnnnnnnnnnnnnnnnnnnnnnnnnnnnnnnnnnnnnnnnnnnnnnnnnnnnnnnnnnnnnnagagagagatgggaggtgggcagggcccttttaaaagggaacgtagtgaatgtgggcaggcggtgctcttggtggctgcagctaagggcgtatcctgtcaggaccccaaggacaggccagtacagatgcctgaatactagcaccatggtcatacctccttttctaggaatatactttgtttactttaaacaatagacattctgactatctctttatctcctgtgccatggtaattgagcggctctcactagaagcacattagagagcatggctaattgtgaacatttgccctaatgaaacaggcaccctatacccccatgtannnnnnnnnntgtcaagtcctctaatattttgagataaattagaaatgcttatatgtagacatcttaaagaatattggttgactaaaagattaaaagagaaaatagatataaagatgaaaagaaactatttactggggtgggggggtgaaacctgacctggggggtttgtttctaatgtaattagatcttgcttcccaccttgggtagacttggaataagcaattgcattgtctcaatgtttcattcctccatccatcatctacttcagtatttactgtgtgacagccatgagtgacacttgctctgagacactggagagcgacgctgtaagctccataagcatcacatcccttgcacactgatcacatttttttttttaccatctctctagtttgagcatcccccatgtccccaaacctaccttcctgagactccattttagagggccctcaccatcctggagctccctcgtgcaggggaccccagtgtctaagatgctctctcagccctgctgctccaccttgggtaccattgtccttgcctctcttttccacttggagaatgttttccttgttgaaagctgtgacttggaaggtccttccattgctggagctctgccactgttagtgatctgagcatgctcgttccttgctcccactactctctgaaccctttaagagtagacaccatatcttctctttgcatctctgggccctgcctcgtgtggttagcacctagaaaaatcttgttgaataaactgaaatgataaactgttgagttctgtggctccttgtctctctgttggtgatttgtactctttagtgtcaggagaacatcaactttttcaggtgaaggtaacaacctgctctgggccatagtatatgtacagttctaatctggatgcaagtattttgtacccggtgagttttggctcccactgtagtgttgacatgaacacttgtggccatgtggcccctgaatctcagggagtcttccagtgtacccttccccttaaagtaaagacggtgtgtaatctttgtagtgtggattctgggctgttggtcatggcattgggcagatcagagataatacgaggatactgtgacaggcactggaggtctcagtcctggaggacgttgatgtattagtctccactctgtgttggctgcaaatccatcctgggctgtcatgtatgcagtaggcagacttcaagatattttgatgaatgtctgtgttaagacatagatgcagagcatcgatcacagtccctctcctattaaattaccaaatttaatcagttaaccctttcttctgtgcgcctgtattggcttccagaaccagaaactattctctgcttacagacaggcactgtttggaaattttgctagcattttgaccgaaacttatgcatctctatcttttcacactttctagatctatattttataaataacattatgaggtgtgtgtgtgtgtgtgtgtgtgtgtgtgtgtgtgtgtgtgtgtgtgtgtatatgtgtgggggagggcannnnnnnnnnaaaatcactcatccttagttcattcttctacattattaagaccctgtctcagtcaaacctagacaccaaggcgtgcactgctccagtcccagaaccctgatgatgagcagtgaggtaacaaagaaaggacaaatatacaaatgtgggaacaggaaagctgggaacagatgggggtgtgttcactggatggaagccacccctggccatccagaacctctgtatgcttattaggtacagcacctgagtttgatcctcaggcccacatggtagaaagagagaactttattctctcttcgggaaaggagggctcccctaagaagtctctataggtgaacatcacttgggtaaggcttgtccattcccatgggacagaggtattggagtccttggcattgctgtgcccatgtcaacaataaacaaccactcagggattcccctgcttcctacactcagagcttaccaaagcagctagtcttggaatcccatctctacttgctcaagggagaaagagtttattttggcttacagttccagagagatacagtctacagtggtgggggaagtatggcaacaagatgactggagtgggaacaggaacattttcatcttcgtataggaagcaaagtaggagaacaggaagtaagggagagtataaatccctcaaatccttctttcaggtaggtacttcctctagcaaagctacgcctcctaaccataacttcctcaaatagtgccacctactggggactaggtgtttaaatacatgagcctatggcagtgatatttctcaaaccaatgcaaccagtgactgtggtgtttagattcatgtgtccaaatgaagcttgggatgcttagagctttgaaggtccaagccgtgtgtgaatcaagctagctgtttagaatccgcattaaggtgacttgtacattctcggttggttgtttaggaaaagagggtgattttgtaataggggcaggtcaggagccctaggataaagacctattgttgctgttttgtttgatggactggagagaagacagctatagaccatcaaactacttactgtgtgcacaccgctgctaaggcaccctggataagagcattttctgtttgttttttgggtaaagggctttactctgtagcccacaatggtctcaaattcacaccagtccttttcccacagccattttagtgctgggattaccagtttttgccaccatgcctagtaagaggttttgttgagaaacattttttttcttctataattaattcctcatcagatcttaacctgtaggtagtgacccatttggttgaatggcactttcatagggtcacccaagaccatgagaaacacggttctttacattacaattctgaacagtatcaaaattacagttctgacaggaggaacattatcaaggggtcgaaacattaagaaggcactgatctatagacttagttggggacattacatcctgttatcaaaggtgacctttagatgtatctactctgtgttttggtgccatgaagatgtttttaatgatgttgagcacctgatttcccttctgtttgtagttctcttttagttggcttatcatagtgttaacagttagattctcagatcagtgggagattgtgttaaaaaaacaaaccctgtccatccagatggcttagaggatgaaggcttgctgccaagcctgatgacctgagtttgatcctcaggcccacatggtagaaagagagaactttattctctcttcgggaaaggagggctcccctaagttgtcctctcacctccatgtgtgcacagtggcatacatgtgtgagcacatgtgcctacccgctctattcctctcccccagacatgcacacaaaacaaatagtgtgagcaatgctgagaccccaaggtgagcttgctctttgtgttgtctcagcattcctaacgagccctgtgtggggtggcaacgagactcacttccagatggagaatctggaaacatggttcctggtggtaccatggctgagagcatatgttcatgcctggttcgtcctggctgagacacagttgcagtctcctggtttctgttcatctccagtgacctggactttgacaccagtacttgggactctccctctggctagaagtaaacacaagaatagtaggaaaggagcgctttcccaagtcatgggatgcctgtctgtctgccttctgtgaggggtccaagttcccggaatagcaatgtgctgtctctgcattgatttctgcagatgagccagttctgagataggaaaaagctggaccatccacaagcgtaaagtgttgagagttactggaagctattatcaaatagcttgtcttcttaaatgatggatggatctcttgtgcttttatattgtgagcatgacttgcacagacttctctatttttaatttttgcttttttacaggctaaacatatttctggctggcatgaatcctttctacttccatgcggtgaatgtcattctacactgcctggtgaccctcgtgctgatgtatacctgtgataaaacagtcttcaagaatcgcggactggcttttgtcacagccctgctctttgcggtgcacccggttcacaccgaggcggtgagtatagtggacactgtgaaataatggcacctaacagcctaacgtctatctgcatatatcagctaaaccaaccctccccctttcaaaacctgtgaattgaaaggcccacaccaccatcagcctcacctctgtgccccagtgctgctttgataatgttcacatgggctctgcccaggattcaattgcatctttgcacaggggctgtggttattataagggtaaaggagactccaaattttttatttgcaaaaataaatttaaatcccatgtgctttcagccagcaggggacattgtgagaccccccacacacacaccttgatgtcaccatccctgctctgcttcatgcctgtgtttacattatgaagctgcaggtgctgggggaaggaccaagaaagctagactgatgacattctgccagttacaaagatggacttgggtaatttagaaattgctttctgagttactgaatgagaagttcaatgattttgtgtgaggaagactctgttcagaaactattgctagtttggatctgtggccctttaaaaaaggtttggtctatcttgcacctgacgggatagtgtcatgaaaccactgtgtcatataacggtgcctgattccttttatatgtgttgctacagggaggtgaaagctttctgacagggccacaaacaccaagattttcagggaatgggtgatggttcccaaagagagaatggcttgctaagcctctgctggcacctggacactttcttgaaaatctacccaagagcacacttttggtaaagacacaacattgatctgttttggagtttgttctctctcatttggatgaggcatgctcatgcattgtgacctgattgtgtccctgtaatccacacctctgagacccctgcaaaaggacagtttgacgtgttggtgttgcgatgcctctgtcaattaaggcatcatagttctagagaaggcttcctggcctgtgttctatttccatgaagaatacaacttggcagtagaaatactgggtggtactctgtgttaaagttctgagtcagaagtgaaatagtgtccagagggattcatagaatgtttatttgaactggcatgggaattctgattcagttaactgatatcacagtgagtcttgtcaatttggtctgtgatggctgtgtttctgtgaacagaattccccatctctgagcctgatgtttgacatatatgtgtggtctctcatgtatatcattcacagggggtgtgtgtaaatatatgtgtatgtgtattagtatatatgcatgggcatctgatgtacacacacatccatatataattatatatggggaaagtgacagataaaatataccttataaactattacatcatttggatagttttcctaactctttctgagtatgttagactgggcaaagttcctgtaagtggaagagtttgacgtgtaagtgacagtcctccagtgtgtcttggtaaagctgattactatacttctgtaaaatagttacagtgagaggagactctgaagggcaggttgctatcacgactgtccaaattaaagtcaaacccggctgattagtcagattatggatcacaaaacttcacatgaaatggtagattccctacgtggtagttgcctctgactttggagttagaagcgctaagccatacctgtaacacgaatccttacgttcctatgcacgggaacagtctaaagggtagaggccagacttagaattgtgcggcacactatcttactcttctaagagaaggtggaccagacacagcacttaatgacacgcacaccttcatgtgtagtgcttaacattttcctgctttcatcatgatgtgaattataaccagaacactaatacataattaaaattataatatgtagagatttatggttgccccgggaaatttaaaaagtaattaagggccatagatacagctctgtggtagagtgatcgcccagtgtgtgtgaggccctgagttccatgtcttgcagcacacacacaccaaaagaatccatatgttttttcattatcgtgaggtaatgtgataagtaaagttcattttaacattagtatgcattaaataaaatacatttaatgttagtatgcaatgcatcaagagaaaatgctgaaggggagtagctctgaagaaaatcacaggaagagagcactccagaggtctccatggaaaggggaaatctccctagcannnnnnnnnnnnnnnnnnnnnnnnnnnnnnnnnnnnnnnnnnnnnnnnnnnnnnnnnnnnnnnnnnnnnnnnnnnnnnnnnnnnnnnnnnnnnnnnnnnnnnnnnnnnnnnnnnnnnnnnnnnnnnnnnnnnnnnnnnnnnnnnnnnnnnnnnnnnnnnnnnnnnnnnnnnnnnnnnnnnnnnnnnnnnnnnnnnnnnnnnnnnnnnnnnnnnnnnnnnnnnnnnnnnnnnnnnnnnnnnntatgaagaaaaatagccaaagatttctgctctccaaggccagggtgacattatgtttttgacaaatttgtagattacagttgcagggctgtgctgtacttggggacagctactgcaagaaagaccaactgattgtgtggccacagttttaattcaatggctgaggagagaagagtacatatgccaggcaaccttgagcagtgtgatcaagacctgatagaggatatattttagttctatataaaaaagaaaacaaaaggcaaaccctattagcaaaatgacctttagaaaggggtttccggggcttttgtactaataaaaaatccatagtaacacaattgaagaggcgtaggttttgaagagcttggtcattatttggagatggatactgggaagatacttgcttttgcaagatgaaggatctgtggggacaagaggtgaacagatctgacccagcacaccatttacactgtaaagcagagtggaatctgctatttaattatagattgaagctcaagtttctagggaggaggacagagagacagaagaagcaatgtacttcatagacaattagtgataaattattaagcatgcacagtaagacataggggtcttgggaaatcactcatctttgtttttaaaaaaagactgaaaattcgaccatatgttatgttattccaggaaggatggagaatttaaatttgggggtggaatttggtttagatccgtagatatgattgcgtgtcagcacgctgatgtggctggctttataagtgaggcagttagcaaatagcctagctacaagctaggcatataggtaccaggaaatcatagggatggggcgcagggtgcctcccccagtttgtacacaagctcacagaaagctggagactagacacacaaatcgatgtaagagaaacaggagagaaaagttaattcacatttaagcatgcagggacacattgattaatctgcctttcaggaagcatttgaatgcatgcatttggtaacagtggggtagtgtcctgcagggcagggactgaagaggaccagactgcctcatttaagccctggagattcttgggcaggcttcccactgttgtgtttctttgaaagtttatgcttttctgaattctcaatcatgaagaaaaaaaaattgggaaaatttaaacttggtcatcacagagaccattggtttgcagaagtgaaagcaaaaccaagcacaaagagtttgaagatgaaagccaacatttctagaatcagaacaggagggctcaggagagaattggctctgatctaatcagttggtctggctcctggctgttgtcacatgtttcatttgcgttcctggctctgtctgatgctaatggagctcattcttgcaggtaaaataaatatttgtaactctatacagagcctacttgatacaaaccctgtcagtagcatttctcaaaatatcgcattataacttggcggcaaatggagttctaatgggcatttcccacctgtgattttgttttcctggctgacaggctcacacatccattacagctcagacacccctaacctaaaattctcaaattccaaactctccaaagcctgaccttcctgaatgttgacatgttacaagtgggaaatccctctgatttcctgacctcaaggtacaggtcatgttgaaatatggcaacactaaaaacactgtataagttcaccctcagaccgtgtgtataaagtagaaagaaatataggtgagttttgtgtttagccttaggtcccatccctaaaacatctcattgcttgtacctgcatgaagatagtctaatctgaggcatttctggtgctaagcatttgggatatgagagactcatctgttttaaattctatctagccacattcactagcactttccagtgtgttaacagagctctaacacaacagcccctagtgatgaaggcctgcagcttgtggctgagagatgtgcatatattcctgcgcaccgtgagctgctttgctgccttgctatgtctgaacactggcggnnnnnnnnnnctgcagcatcaccagcgtgttaaccttctgcctctgctgccgtggcctcggcgttctccctattgacagtactatcacttctgcctccccttccagaactgccgccgggtctcctaccgtccaagaggaaggcacgatagtgcctttcctggtcacggttcgtcatgtgccccttgttaaactcctgaagtcttctttgactcttttactcttgggtcacagagctggcccttctgtgaagcttcttcccaggtcctgtagcgggaatgagtcctttctcttttctgccaacaatttttctttgtgatctatgtggtcttgtctctgaatgtaaaaaataaataaataaataaaaaggaaaggaaaggacatgactggtaggtgtggtggaggaagattgttgtggatatccaggagagtccagggtggacatgaccaggctgagctgggttccatagggagggggggagggagaaagggaaaccaggtgcagtagacagggggcnnnnnnnnnnnnnnnnnnnnnnnnnnnnnnnnnnnnnnnnnnnnnnnnnnnnnngggggaggggcggcccagccccagagctggaagagagtttagggtaaagggcagggtatgccagccataccctgtaataggtggaaactgagggatgctgggagaacctggcagccaggtcggctttggtatgttaagtaggcacctcagccccttgttcggggtttaaaacttgacagtgtcctatttaatactctcttctgactccagcagatgttaaagtccttgaggcaggcttatagtacctgcttggaaagttctcgatcactggaacaagcccacagtgaagacttgatagcatggactgacagtcacaggaaatggcagctgtagccaagcatttgatagggatggttactttgttatagaggtccaacactttgcccaagacctcagctcaacaggggtacacggtaggcatttaatgtggcacgctggaaagttgtggttcagcctctcgaggagcctgctagcatgggcactagcgctgtcacaccatctctgaacttctgctagtgggattctacattatgatgttattgttgaggtgagggcttactatgtaacccaggctggtcttgaactcgtgaccttcctgcctcaaccttccagtgctgggaagacagatatgagtcagcatgcccagctagtatattctttttttttttttttttttttttttttggtttggaggttgtcctggcactcgctctgtagaccaggctggtctcaaactcacagagatcagcctgcctctgcctcccaaatgctggaattaaaggtgtgtgccattaccgcctggctattctttatgtcttggtgcattcaactggcatagtcgtctgcgctttccagattggctcagagtgaggagcagggcttcaagacacttggcgggttctggttattcttgcatagcttttgattgctgtactccgccttgctatattcagagtcaacttgcaagtcttgctgttggctgtggtgatatcttgtttgtacaaataaagcttgcctgaagatcagagggttgagctagccactagctaaccatagagatctggaggtctgtacagacagacaggaagtgagatggctgggcagagagaggaattataaaggtgggaggagacaagaactcagtttttttttccccgctggaaagttgagtaggtaaggtggctgtggttttgctccttcgtctctctggtatctcagcatttccccctattatctgactcctggctttcattattaagacctattagaactcgtgttacagttggccacatcgtttgttccaggatgagcatccctctaggctttgcctcaggatgtcatggcaggctagggtgggctgtcttcttaacttgagttcatgctgagttaaatgttccaagacagcagtggccactgagcctatctgagccccaactgtgacttctgcatggtcgttgcttagcctgaactgggagcttgtacctttgtgtacactatcactgcctgcctccctggagccaggcagcttctccgatgtgactctcaagctccttatagatcagccaattaatgaacactccgtgtggtccaagccatacaggaagtgctatgttggagttaagagtttctcccttctccaaaacatacacaatgtagcaccttcgcatgtcacctcattggcaacagcagtctggtgttaacacctgagatgataaactggggtctcagaagtcaggggctcttcctcaccaacaccatggcctctctgactgtacagtgtgctcataacacagtatgtcagtggttcaaattccctgaacattatttcctctttatgttggttgattcggcagtgcacatggacctgggttcttctctgacttgggtgatgtttgctgtgcctcagaggtcagccttactcatctcccatgtaaacaactcctggccatgatggggaaatggtcttctggatatgtttatcttactggttgatgaataaaacactgtggccaatggggcagcaagataggcaggtctaggagatgaggaggattctgggaggtgtaggcagaaagcagtcaccatgtaggatgccagaggagtaacaggtccctgggcttttctacagtaagataagagcatgtggaaatacgtagattaatagagataggttagtaattaagacagagctagccaataagaagccctagtcattggcctacagcattataattaatataagtgttcctttggggctgacacagctgtgggaccaggctgatgggaaagggtgtttgtaacatggcccagctcttcctgagatgttgtgttgtttagtttttgtcaacttgatatgagctggagtcatctgagaagagggaacctccgtcaacaaatgccctcctagtctggcctgaaagcaagccattttttttgattgatgattgattcggaagggcccggcacagtgagggcatggtgccatccttgggcagatggtcctgggtagtataagaaacagatatgtataagaacaagccttggaaaacaagccagaaagcaatgtttccctatggcctctatttcagtttctgcctccaggttcctccttgagttctgctgtgacacgaaataaactctccctcctcgggtttcttttggccatggcactttgtcagagcaataggaagcaaactggaacagaaatacttaaaaaaaattatatgttcctgtttacagtcttatagcttgtattaaaaggagagagagagagagagagagagagagagagagagagagagagatgatcttcagtgtgagttttatgctagcacagcaaatgcccattccagcttctcaaacagcacttacttctaaagaaacttcaagcttcctgctcacactggctctatgttctttatcaaggcccactgatttttaacttttgctggttttgtgctgttattcctctcttcctccctctctatgaaaatattgtttgttttctgaagcagttacagagggctacataattcatgctccttcacacatcaataattcagttgtgtatttcctaacacggagagaattattcatggttttggtttcatctcttttagtcctgaacactgtctttctatcatataatacataaatttcaatatggttcagagtttacattaaaatgcatgtagtataaactgtttttgatgtatttgtgtgcaacttattaatgttatataaatatgtacaatataatgcataacacaaatacttattagaggcatagtatattaaaatatataccttgaagataaaaaataatataggttgtgtttaaataaatagaatgcatttaaaatgtacaaaatttaatatcattatcagtatatatacacatatatatacactagacctataagtttatgattttatattattacaagttataagtagtaacataattaggaatcaagattaataaaaatacaatatacaatgcaataaaaaatacaaaacacaataaaaataaatgtaataatatcttaatgtagattaataggctataatttaaaatatgtgtttatgtttaataacatatttacatcctctttcttatggattgtgtctctccttgaaattgtctgatttttctcatgcacgtgattaggtgtatacatccttggctagaacaggcctgcatggtgtctctgtcttatctttgaagatagttttcattttgatttcttggtgaacatggtgtgctgtcttaagatgtcctctccatagtgtcttcactctttcatttttctaaaaattaagttggtgagcaaccgtttgaagttgtgtagataccttgcatctcaaataaattacatattctagagttaccgtctgttcattttattggtgctgaggattgaacccagggccttgggcttgctggacaagtgctttactattgagttaccctcctagcttgactgatatttctggcttcttgttctatccaaactttactcttctagaagccaatgttattttccagctttgcccttttatccacaaacatcgatggcttttttagccagcagagtctccccgtgtttattcattcattcattcgccgtttgcatttaggcacttttaaccttcatcacccgtgtgtcatgcatgtggattgtagatttttgtgtcttcaatggtttataatatatcatgttccttatatttaaatcaagttttttcaagtttgctcagcaggagccccttttctttggatcctttcccctttgactaacattctgagtgcttctgtactcggacatgagatgatgatacttgctactcttgagtttccccaagcctcggccctagaatcagacttttccagggagccagtgtgtttttctgaggtggggcagtgaattatggatcattgacagacccatgaagccacacagacacacatctgtgtgcacacatgcgcacacacaaacatattctttttagcagccagcagtccccctcatttttaaaaatcctgatttctctcctttgttttccctccactctgtaaattctctgtggcccatcactgccccactctccaacgatgagtacaatgcctgacactcatgtttgatgataggtttctttgagactcacacccagggcattgtacagtctagccaagcacgctacctcttagctatgcccacaacccttaaagtgtattttaataactcaataactgaacaaaattttatgctgagaatttatcctctgtggaagagaacctagaaataaggttaagaaaaattctgtcactttgtttctccttctctctttctctaaatgtactgtggaacatatgtaataatcagaggtgactggaggtttggttcatagattgccatctgtaaatactatgctttctgctgtgctgttcatatgtctagaatcagatgcatttctgcaagataccgtgacaataattttccgagttttacatttttttccgttgtgttatactttctaggtggctggcatcgtgggcagagctgatgtgttagcatgtctgctgttcctgctggccttcctttcctaccataggtgagtgggattgagcaaactcttctgtggttttggtcacatactgccatatatacactaaacccctgtttgaccagagagaggctgtggctgtaacatgctcagtgggtaccagggagagaaacgctctttttacccagtgctcacctgttattttccaaccccattctgaagtattcactgtgtgtgtgtgtgtgtgtgtgtgtgtgtgtgtgtgtgtgtgtttgtgtgtctgtgtgcatgtagtgtttatacatgcatgtacatgttcacatggagacaagaggtcaatgctggttgtttttctcaattctcctccaccttaccttttggagcagggtctctcacagagcctgatgggaatctgtgtatctctgtgtataaccactcccctacccaatgctatgattgcagacatggtggctaacactttttttcctgtttaatgtatgccagggatcaaactcatgcctcatgcttatgcagcaggcacttcgcccactgaggcgtcttccatccctcagctttaaaagactgccatccccacgctgggaatccaaactcttgtttcttttgcttgttgatccctggctgaggatagaactttagctgtgaacaaaaaatagatgtgctctgttctgtttgcctttgatttgtttaatttatcttcatttcattcatgttttaccctgttctattattcttacaatagccactcacagttacataacgaggttgactgggaagtattgtttcttaactagagttttgcacttcagaatcttttttttttttgtcaaaatacaagaaacctctttctattccattgtgcctttatccccaaagtgaaggcatttttaactgacttgtaacatatctacatgtagagcagaacaagttaggaaaatgagagtttgaacagagtgctcagggtgtctccctaaagatgccaggtcagctataccaactgacttcgtagagagacgctagctgggaattggtaaacttggcctttgagttagatttctgctgcagctattggtagagaaaaaggaagttacgaatgaacaacccatgcggagtttattgacaagggggtgggggatggagttggattgtcagccaacccaaggagaggcagagtgagagagaaggggggaggctggaccctttaaagggaagaccatgcatgcgcagtgaggcttcacgcatgcacagaatcctcatgcaggccataatgcatggtgggtgatgtgatgacatagcatgttttcctgtgcgtgccgcccatcgttaggggggcagggtcagccaggtgcacatcccaacactttggatcaatttgatgaactgtaacttacaaagcccagtgattcacttttaagaatattgttctaaacctacaatattgaattagcaaaaatttcccttcttcctctagggtagtagttcctttggcatacctatgacccaaatatctgagagaacagcctaaaggaaggattatttatttgggctcaatgttttagtcaaaacttggttcttccgtcttccagtactctctctattcagacttggagcccattaatgtattaaatcactcattaggccagagcccttgtgacatcagtcacctcaggggtcacactgagcccctgtgacatcagtcacctcaggtgtcacactgggcccctgtgacatcagtcacctcaggtgtcacactgggcctctgtgacatcagtcatctcaggtgtcacagtagcgcttgtgacatcagtcacctcaggtatctctctagcccttgtgacatcagtcacctcaggtgtcacactgggcccctgtgacatcagtcacctcaggtgtcacactgggcccctgtgacatcagtcacctcaggtgtcacactgggcccctgtgacatcagtcacctcaggtgtcacactgggcccctgtgacatcagtcacctcaggtgtcacactgggcccctgtgacatcagtcacctcaggtgtcacactgggcccctgtgacatcagtcacctcaggtgtcacactgggcccctgtgacatcagtcacctcaggtgtcacactgggcccctgtgacatcagtcacctcaggtgtcacactgggcccctgtgacatcagtcacctcaggtgtcacactggacaagtgacactggcatgtagtagatagagagtaaaaatgcccctggacagatgtcctgcagtatataggacagacctcacaacaaggaatttcctggcagggaaataccaatatgaccgaggatgcaggtaccgtccagtggaggccttaggtctggagtgagatgcatgaaggctcaggaggaagagggtggagccagactagtgttcatctccaggcccactgcctactgcctactgcatttctaattgtgcaaacactgttaggaaatctgaaaacttaaggttggatttaatactttctattgggccagaatcaatctattgatttaatttaaaattttccatttggttgatgtatctgagaaggtgatgagctttgcatttgcccctgtctgtgtgggtgtgagctggatcatcacaggtgattgattgtatatgccctgctcacctttggaaatttaagttctagatcaaccccatggagaatgcacatttgccatctattttgcatgtaattttgtataattgttccaaggtgcaatacatagaagaaactgtcacaatatagacagagtgttggccctcacttcaaaggagagggagctagtgtctgtgtgcctatatgaggaaatagtggtacttcctagggctagttttatttataatttggaaaataacactgaggacatcataaaaattcctgtaggaaattgtgataaaaaataaagatgacagggcttgggagatggcagaggacccaaatggtttccagcacccatactgggtggttcccaactgcctgtaagttctgcttcagggatctaatggcctcttgtggcctccattgcaactgcattcacaagtgtgcataaccacacacacacacacacacacacacacacacacacacacacacacacacaattttaaaaattacccaatacatgtacgttgaaaataaattcaaatgatcagagtagtcaaaagaaaggaaaaatgcttaaagcctgcctttccatcatagagagaagtgctatttacttgtctccccccgttgagtgcatatacgtgtgtagaaacactttgatcaatcatggtgatggacacttgacatctgtcacttatccagtccttgctaacatgctaattctcccgtttctgcggtatggtatcccatttgctaactgtacatctgtggtttgtaccagggaatctggcttctcaatccatgcatatttgctagtaatgtgtgtcatttgcttgaaatattcacataaacatctttctatctactaagtctatccttatgttagtgttttaaatgacttttttagtgttcattcattacaaaccatactgcatcataatttgcataccgtaatttagttctaagttgatattttttggactttcttccatttaaacaacattttaagagatttaaaaaactgtgtgtgtgtgtttgtgtgtatgtgtgtgtgtgtgtgttctcaaggaggcccaaagaaggggtaggatctcctgaagctgcagtgacagggggttctgagctgcctgatgtgatctagactcccttcctttggcagagctgcaagagctcttagtcatctcttcagcccccaccattttaacagtttaaaatagttgcatggcaaatgctctgggagaaatctttgcttactgccttgttctacacgagatacatctctaaaagatactgactgtttcatagcaacccatgtgttgataaggaaatgcccaacttgctttgcaggagtctggatcagggctgtgccgggcagtgctttcccccgacagcttctcccttcttcctgctgctcagtctgtttctggggacctgtgccatgctggtgaaggagacgggtgtcacggtgtttggagtgtgcttggtttatgacctcttctccccctcccacaagcaggacaagttgtaagtcatttccaacctgtgttgttgtattggttacttttcctgttatgatgaaccttataaagtaacttggaggaggaaggtttttttcttttttctgattcatggtttctaaaactgtcacatctggaattgaaaggagctgttttgactaccagtcttcactcctggtttgtttgggttgtgtcctgctgagggaatcctgattcacaaagaaaatcgtgtcatgaatggtaaacattagctgcttgtgttgagcccccaatttctgatggctgttacccacgagtgagctccatgaacttgaaacctgtctgcttgctctagctgtgcaatctaacagcattaggaggttggttggagacattcttgggtattcatgtgctcacagttgtgtgatttttccagttgaagaggaaacttatgaagcaccctattttcctcttaaactgtaaaggtccatttgtttcttgtgtggatttcgatgctaagagtgactggggatattagaagttcaagcatgtacaattttctttcctcatcaagcccacagtccctggcagttttacatgtgtcattaagaaaacaaatgacaaatgttgataagcttgtggagacaagagaatacttacacactgctggtgggattgcaaactaatgcagtcactgtggaaataagtatggaggtcacgacaaacaacaacaacaaaaagtctatctatcatatgacccagctgtagcatgtctggatatttaccagaaagactccaaatcagcataccacagagacatgcacatgaatctttattgcaaccagctgggttcaaaattgacctaggtgtttatcaacagagaactctataaagttagtgtagtatttatatacaatggaattcagccatagagaagaaagaaatggtatcatttgtaggaaaatgggtgtatctggaggtcatcacacatggtgaattaagtcagaaagacaattatcttgtattttcctctcatttgtgggttatatcattgtgtgtgtgtgtgtgtgtatgtgtagaattcacttgggactgtcttgggaatgaagggaaatgaatttagaagaaaggaaggtcagagagaatggtggggggtatggttaaagaggctcatatacttacatgcaaatatcctcatgaaacctagctgctcgcacagagaatatgtgccaggaaagacaaaactgaataagaaaaatcgacaatgcaattatgcatttgaaagtagatagttgcaaatagcagaaacaggagacttggagacttgaagtcacatccttctagcagtctcagctagggaagcaaggggtagctgcttttctgtcacaagccttgtcattttgtctgacttgctttttccttaattctgtgaactattaggagcaatggggtgatctgtcagcacagcttacagcagccagggaacccccagtcctcctctcagcatggccacccccaccgtgagagcagaaaacagcgcttcccacacaaagacacttggggaggctgccatcaaccgctgccaccggagcccaagagcagcggattccctgtgtccccaggagcagtgtggtccctgatgaggtaggtactgggctgggttctccaccgtattcctttcttttgttgtgattgcccagggttgcagcccatggtgtctgcagagctgaagtactgagtcaactctctgggatggccttccttccccaagggtcttgactgtataggttggggactttcatggtgggctgggaaattagtccggaggactgtgaataccttgagggtggacactttctctgtgttgcaggcagttgactccaagttgttcatgcagtctttggctaatagttatttaaatgtttgtgagagtaaagaaattaagtagaccataagaatggattggaatcaaccataagaaaaaaaggtttcagtagaactagcaatggtgtaatgcgggggaagatgttagatagaagaatgtaagacttttgtttgcatttttattttaagtttcacatgtggggtttaggcccatatgggtgcagatgaactatgcagaggagagacgagagataccagagcagaaagtgtaaaggtgaaaatccacaagggtggcatgctcacgtcctctgtctactaacttgactctctgaaaggggagccaggtttatgcccactcatttccatgtaaatgtccctacctcagctgatgccaagctgtggtgtgacatcactggcctgtcagtcttcagtttctaccagacagaagacatcagcaaaatctcaagaaccaagtttgctatgtagtctaagtaggaaatgcccagagtggatgcgtaacactcttttgatgtactttgtttaagcttatctaacttgatctttggtgatagctggctttaataagtagcttgcaagattcctaaacaattagtcagtgcctattcctgaacatcaatgaagcaggtccactgtgaaagctgaaacaaacttcttatctgctgtccacccacctactgtttactgggtaggggagacacttgcacatcaagtcatcaccgtgtctgtggccacactcaaagttagcaagtgtgggaggctgggctggaactgggctgggtcacttagtcctatgctttctctaccacttgtcaggcttggagtgcaggatcctggtgagcacttactggaggttcccacttggaccagtttgtgtcttcttggctccttcattactgctctgggtttggaaagattcatgcagtcatctgtaggtccacacatgggaagtgggtgagagtttggtaacattgtatgttacactctgttttttcatccaggacaccatgttctagaagtaggccacattctcacctggtcagcatgattgtatggaaagatcattttccctcctggggaaggaaggctgccgtatgtcatctatttgagcgtaaatctattactaaaattggttaagaaaactctgcttatttttttgtcagatgtgtgattgggtaaagccactgagtttggagaggcaatggcatcctgccttttaagatctctggctcagtggacaggacattaagccacaactccttcagatgctctctgttaccctaaaagtaacatgccagattggctgccaggaccaagagtactgaacatcaacaacaaggaaactggtgccttgcagcccgtgttcttctgatatgccacagacccctgcatccttactgttagctcttacccttgctcgctttaactgctgacttgatacagtctagagtcaacccaagatggaagattcagttgaggaattgatgactttggcctgtaggcgtgtgcacagggaattgtcttaactattaattggtgtaggaggacgtagccctgtgggagtgggaccattccctaccctctgattctgagctgggtaagaaaggtggtgcaagcctctgagagagcctgtgttcagcagagttccaccacggtctgctctaagttctggccctgacttgatgtgtaagccaaacaatccatttctccccccgagctgcttttagtcagaatgttttatcacagcaacaaaaggagcctcgcacagttctgctgtgtcacgattgatcgggtctctgaacaccagggtgcaatgtgagtggtgagcctgtcctatggggcaggaagagagattgtgtgggggttttctgttttggtttatcttgtaggatatatatctcaagctttcgtaagtggctgacaaaggctcaatcgagaattgtcatatgaagtgttgttttcagaagtttcataattcaggggaaaatccaaacccagtaggaaaacctactgcaaggcattgatttagtggcttgtctttgtgtgtgatggtcttaggggtaaaaagtatagcgggagatgggaaagccaagggcgcacgccctggagtcagatcacagttggctagtaaaaccatttatggaaccactgtatgtgaaatgctttgtatgacggcaaacccccggcatcttaaagacatgaaatacacacatgctcacacacactcgagtatgtgtgcacagaggcacacctcccctttcatgttaggaagctcggagagtgctaaaagaagtcacatttttgttcttcatgtatacacgcagtcaattccatagacaggccacagtggccacaattggcaccaaacacagtggtttcttgtactcaatcctctgcacatgtccctttctcttgacacccagtggaagtcattctctctcatgacatgccctgctcctcttgtgcatgtttagacattgttttagtgctgagaacatagagttaataatgacagtgaccaatcgatgagcataattaaaattacttctattaaagtatatatttatttaatcctagcactcaggaggcagaggcaggcggactctgtgagttcgaggacagcctggtcttcaagagctagttccaggacagcctctaaagccacaatatatatatttatttcatttagtttgagtgtgtgtgcgcgcgcgcgtgcgtgcgtgcgtgcgtgcgtgcgtgcgtgcgtgtgtgtgtgtgtgtgtgtgtgtgtgtgtgtacaatttagtgtagagattagaggacaacttgtgggagtctgttctctccttccaccgtgtgggtcctgtggattgaactcaggttgtcaggtgtggtaacaagtgccttaaccagatacaccacctcataggccctgaattcatttactatcaaatggctttaaacctgtttatatctaggatggtatcacttgggctcagaattatctaatacccttttctgatcttagtcccataggcccccagtgtcttcacggctttttttttttttttttttttttgtcttagtgtagcgtattgcttggacttttctgggcccttacactggtgcttgggcctcaggcaagctgataaattctagtttgcagggaggaagtagattattattgcaggcatctgtcctcatgtgaagacggacatgatttgttgggaaggttgtgaaggaaatgctgaaacatttacgtctttattaacaatttttgtcattgtttgagagggtttctccttatagggcaagggctggcaggagacttacatcatagcccaggctgtccttggacttgaggtcctcatgaagtggcaggttactctgaactcctcttcccctccagagccacaacctgcatgacagacaaaaatcagtttctcctttctttgagagacaatgcttgtaaaatgttcaacagatcaaagggttccttcttccttgctggggaatgatctgttgtaaaaatgttttggggctgagagttctttgtgacaagtgcctaaactcagtcaccagtttaagtaaaggaccctttttgtcctcctatgtatggtggtctgtaatttcctttagttcactaagacactcctgccttggcctcctgaatgctgctattacagccatgcccacccaccaaggaatttggcataaaataacttttaaaaaagtaaataagaatcttatttaaaaaataccctgatggtatcatggttacaaggctcatttaacatgaactgtgtgtttgcagacagtgtggatttaaagtttttatcgactctaaagtaatttctctcaaatatggaatataccagaaaaaaataaaactttcttctgtagatggagaggaagaacacaaggtggatgtggattttttttccctctgaactatttcctgtctgtgaactcagagtgggtaggaatggcaagcaggcccaatgtgggatgcaacagaaagtgcctggacacattcccccagagctggttgacttcctgttccgtcttgggctaagctcaatgcagcactgggtggctttaacagagtctcggctggctttgtaagactcagcaccgaaagcttctccccccaacaccacacactcaggaggcagagctcctttaatttatgggagcagttggcgcttttgaggggctggcattcccggcttcattctgcagtgccatgattggcttctgcttttctgagtcgcagtcataggctgatcagttccttcccttctcagcatagagccatcaagctaggtgtctgattccaagtggagacacagggacatatgttgaaggagagccactcgggtgcaggcatttctggttggcactcaaacccgtcaccatcacaggaagctcctggaagaggtctcagattgtctgcttttccaggagcccaacagacaccatctggagtatccagcgtctggcttctgtggttcagagtgtggcagctgtgacttcaaggccaccaaccagctctctcttccagttctgctgagcttggagagagatctcagggtgtggctggcaatttgctgataatttgctcttctagtcaatttctttcttatgcagctgatttttccttctttctcttttgcagtgtagcccatggcacgatggtaataaaaggcagtatttgttcattgtaacaatatgaatactcagggcgtgtgtcagtgttcttccgtgagatattattctgtgccaggtcataagttattgtggcttcagacatttctttgggatttgcagtatgctacttttcacagttgcctaacgtgttttttgatcaggtaccatgtattacgtgataccatcaatgtgaccaaatcttaaaatgacacaccgcttgaaaggaacaaatcttcaggaagtgtgttgaagattagtttgtctaatgggagtaaagcagaattgtggaaatgcaaatgatttggaaaccctcttataatgggagtgatcgatgagaccacgattccatcatggtcaatattgcaggcatatggtagtacttatgtgtggctagcatctatatgacaggcattaaataaagcttggagttgtaatccttaccaaagcctgtgagggagacaatggcctcccaaagaagtgtcctgggtttggggtacttagtctgccagttgtgtgactagctacagatcacttcgtctctggttacttctgtgtcaaagactctggccctggtacttgcctcctggagtcagggtgagaagcaaatgagttaatatgaaatgagcgtagagtaacttttaattgagattttcacaggtgttaaaatcctgtacacattattttatgttaagactggtgtgaagcaaagggtgtttggaaccctttttctttattgttgttgctcataaccatcactttttctttgctgtatttataaggggagttgtttagtcttggtttgacttatttatagtgtctggcaacattctttttatgcacttacaatgtgctagaaggaaacagaatactaaagacaaacattccatagtcatggtgggacattgtccatgtttacaggggagtagatgtctgcgattgtatttcattaactgatatgagctgtcctctttagagtttcaaacattcttgttattcttagattctgaaattattgacttaaaaaaattacacagctagccttgagctcctgatcctcttgcctctgcctcttgagtgctgggggtcactggcattgtgatgtccagcttagtttgaaatgttgatgcatttagggctatggctgaataaaatgtgggtggaaatccagtaacaaagacttgatacgtgagtttttaaaacagatgcctcaataaccttaggaaaatgtgcttcatggtatggatttatgaatttttcatgttttcacatcactcaatccacagtctatattctctctataagctgaggatgcatattgatttcaaaatcaccccaaggtactgaattcacaagaggcccaagcattacagatttgcctttaatgatttagcctgctcaactagtgctaaaatgtttaaaagaatgtgagtattgacttttaggggataaaggcaattaatacagcataattgaaaaaaattaaaacaaaatcagccagagctcagtggaagagagaactaatgtttgtgttttgtgttagagttcagcatgtccagatatattgtagtaactggtatcttggttcttgagtggtgtggagcatgttgtcaccaacagttaaatcttataatatatattttttccgttctgtgtattcagttccaagtgagttctctttgtggtggaatgtagctttggaaagaatgagtatctacaatatgcaatgatgaaaagctttgattggaaaaatgaccttacttggacagagccagcaaagactggagcttccccagtagctgcctcctcagttctctgcagctgtcaaggacaggtaaactgatgaggcatttgtatccaggcgctcaattatggttatagttggtggctcagaacagaacgtcttgagcgagaacactcattattgcattgcccgaattgtttatgaaaagtcaacaacaatgtggactgtgaagagtgtttggattttgttttgttttgccttttgttcttgggagaacaagttgtttctagatcttcctggagctgcagataaagaaaggagaggtggtgtgttttccccgctggcttccaatgtgcagcatgtctgttgggtcagttgctgacctctctggatctcagtctgatctccttcctttccttcctccctccctcattcctcctcgctatcctctctttcccccactctcttgttaatctttccctttctcttcttcacttttccctcccctccccttccctctcttctcttccctccaactcattcatttattcatttatttttgagacagaatctcactgtgtagaccaggttggtttcaaactcagtttttttgtttgtttgtttgttttttgccagagatgtctgagtgatgtcattacaagcgtgagataccacacctggtttcatacttgtgtttcatttacttagttatttgtacctgtgtgtgtgtgtgtgtgtgtgtgtgtgtgtgtgtgtgtgtgtgtatgtgtgggtatgtttttttgcctgnnnnnnnnnnnnnnnnnnnnnnnnnnnnnnnnnnnnnnnnnnnnnnnnnnnnnnnnnnnnnnnnnnnnnnnnnnnnnnnnnnnnnnnnnnnnnnnnnnnnnnnnnnctactgtgttcaatttgtcatttccccctcatttccttttctattctagacttctatactgcctgggtctttgaaacttaggtcaaatgtattgatggaaaatgtcaacattaaaaagattaacttctaaagattaaataccctgcctccagccctcatagttgtccttacagcgttggtcagatcactgattctttggaataatgcacatttattatacactcacagcaagcccgggtcttaaggatcatttacagaaaggattcgtgcggatttttatattgagcttggtttctggacacaatggccattgggtcggtgtgcatacttatttgcttttgcctttcaagaacttgctggcatctcgtttgattatttaaatgcgtggttttacttctcacttttagtacatttattattttatgtgtatatgcatgtgggtgcacaccatggcacccactcacgtgaggtcggactacagcttgtgggatactgttctcttcttctaccatgtatggagatggaactcatgttatcaagcttggcagcaacgctctgtaactcaccgaagtcttgccatctgtccttcctttcaaagactgctgttatttgagtattgcaatctacactcattctgcctttctatatccctctcagttcaattttatgtacaagatgagctgtgaccactatgtcctgattcattctcaataaagaaagtagttggcccagcctggactagcttctatggaggtaggaaatcatgcaaataaagggtgagaaacacaagggtagaattagaaagaacaccaaagaggtcaccttagcaacctgagaagtccggctctagctgagtctgttatgacgagacagtgagctgggaggtggtgtggtccctccaggctgaaagcacagtgtgggcagttcaggacagagatggaagaagtttccaggaggaagctagcactcaggcacctcaacccttcttagaccgagctgtgtgctgtgtgggcttgtctgatttagatttgtctccagtagagcctgagcacaagacttttagttttcagaatgtcctaacaatagttctagagtttttgaagcaatgactgaattttgtgtagctgtggaagcttaatatttccttttaaggttgtatcaagtatatatgtgtattatatttacataaaagcatcatttatttgttgacatagggccttaccatgtagctaaggctagtcttaaactcactaattagcttagactagcatcaaaattgaagtgattctcctgccctggtctgtaaatatggattcacttgttctcagagttttgtactttttgcagaatgttcacgtttaagagaagttatcaggatccttgggagaggaaatttttcctggtcctcagtaagagactactgtggttagttttaaaagtcaccttgtgacaacctaaaatcacctgagaagagaggtacttgcctagatcaaattggcctctgtgcatgtctttagggggttgtcttgattgttaattgaagtaagaagactcagctcaccctggtggcaccattccctaggcaagaagccctaaatggtgccagacaggagaaatctagatgcaggcagttagcaggcagtatgggtgtattcgtctcccgctgcttttcagtgtggctgtagctgcttctagtccctgccttgatttccttcagtgaggtactgtgattgtaagccctatagtcccttcctttctgtatgttgctttttgtcagactgtcagtcatagcaacagaaactataacagggacagagtatcatttattccacctgttcattgagttaaaccctctcaattcatggctgtcttccaaagagcatggtcgccagaacccaataggctgctaaccccttcctgttattcattcagtatatttaacttataattttgattcctggcttccacttaaagcccttattttctccttatgatcgttatgcctcggcagctgttgtatttcattctggaacagataattactttccaaagtggcagaaaagtgagtggttgtgtttttctggcttgattgatcaggagctctgtgatgcaatattgactgggttttccacagtgacagaggaagggcaccaatgtccagtggcagctgctacctgctggtagcttcctgtggccaagacaaatctgactgagtctttgtgtcagattctggctttcagaactcaaggttgaagcagtttaatggtcatgtaaggaaaatagtatgctgtcctgaaggaccccacagatgcaattttgtttttcaaagttctctctggaattttcttcctggctcacatgtaatcatggagtgccacagcaagctcagtggctcatggagcccagagtcacgaggaagtgatttaaaggagatttctcatttagcagcagtagaagtttattagctgatttctagagttcttcaagggaatgactggtggtggctattatagatggcatgctacctgctccttatatgaagatactcagtctcttccacaattggagctggcagaggatggattgcattcattgtttaatacccccggctttacttttcaatgtcttgggggtttggaattgttatccatcatctcctgtcattttaggtaaaaaggaaccagtggggaaatgtcttttacgtggcttgacccctcccccgactctatcaccaaacccttgggacatatgtcctcagtcctcaaatgaaagacagagtctcatgctagactcttcacgtggttgtgtcatttacaaaatctctgcctagttattctcactttgatagatcagcaaccagatgattccaggtgtttgaggctactgaatctcagacttaatctctagtatgactcccggattcatcactgttacatgtgaaccaagaaggtcccagggcccagagactgtgtaacttgcacaacagtgaacagctggaaagtggacagtcttggatttgaattcatacctgtttgttcacctgcccaggcttcttcagactgccaaagttagcagtatttttctgcaaacatttatgaacaacttcgagaaagacctaacatgggggaagggggtactcattgtgggtattgatctactgccaatgtttggctgcatagggacctaaacggcagccctctgagtggcagctctgttttcctcattagtgtcaaggtagctgaggaggtgagacttgtctattcaccataaagcaaagttttgggcgggacacttcacgtttttaaaagctctccagggcagtgttcactggccactcaggaacagatgaagcccagcctgctcttccttctgagcttggtgccagaaggtcattttgcccttctgtggaatctcaggagtggcattttctagtgatggatggtagggctcagggctgtctctctgtgcacatagaagtattccatgtgggcacaaaccatgcttcttgtcaccatgttacaccattcgtttgtaaagcaagatgacgaaaatgagaaaggctgtcgttctgtcactgagaaatttaaaatattaagaatatgagaaatagtatcatagattttcctgttgctatttaatcactttctccagtctctctctctctctctctctctctctctctcttctctccctctctccctctctctctcgctctctctctctctctatggaatcaagtagtagaggacagaaaggatctgcctcaccactgcattattctaggtcccttctcagctccttagggttggggaccgagtggggtttccataagaagatgctcgactgggctgcctcctcccgtcatcaaagcttcagtctctggtaaatctggtcctgcagtgaatctccagtaagaaatggatcagaggtgtgtgtggcccaggggaaagtgtgttctcagttcttgtctggtccttcaggctgtcatggacctcacagacatcttcctttgaatctttaataacctagagagacctaatttccggcaactgtaaatgacacaaagctgactcagatttaccttcatctctcctacttccagtcacctaagcacctgctgtacagtggctgcaaagtgttgctctccttgctctctaatgtcaaagccacaggagccagcagtgactctcagcaggactcaccctgccctatcagagttctcctgacacatgcagtcagccgtctccaagtctgccgatgtggttcctataccttcactggcattcagtcaacaccatctgggtgatgaggtcatagttttcttagtggatatgatatggaaatctaaaatagagtccctcctagacgatgtggagtgcgtgtgcgcatgcgtgcacacaaatgcacaaacgcatgcgtgcacacaaacacacacacacacacacacacacacacacacacacaatgaggcacagccacaggccaaggtttttatattcctctttagtttctgtaatgtggagcttttgttttcttgttttgctttgtagaacagaagttgtgacaggaaacccgttctctgtgatgaaagggagcctggggggctctgaggctgtgcaggctccttgtaaacacaacctgtggatcttttgaataagatcactcttgttattgctgttctttgtttctgttttgagtttgctttctgacagtgtttgacttccattataaggaccagcttcttccaggctaaaaatatctaaaggtttcagacaccgagtcatattccaaccatgtttccattcagccccagagtgaaggtgcctgcgtcagggaagcagagacccagcccaggacacccactcagaaggtgcatccttgtactgatgaggggtgctttgggaagctgtgacatttcccagaagaattcgcttagcacacatgtgcacgcattattaccatattctgtgtgcatgtgcgtgtattagcacatgtgcagaggccagaggtcaaccctggtgtcactgaatgactgaatctctcactggcctggaactcatctattaggctaggttggcgggctggagagccccagggatcctcctgtctctgccccctcagtccggggattgtatgtctgctaccatgcctggctttttttacataggttctggagtttgaactcaggtcctcctatttgcatcacaagtactttacctattgaactgtctccctggccagatagttctgttcggcctgtagaactgtcagtgtaacctgtgaccactgggttatttgcacctgtctgcatgctacagcagctcagagggtatgacaagtgtcagaaatacaggaaggaggatggcttggggtcaaaggcagaggtcagggtcatccatatgggaatgcttgcatctcccagggcccatcagagcacgcagctgttcttcaaggcagatgttccaaaagaaataaactgtctctgtgggcatcacatttgtgcttttttgcaggttaagagaaatacagaaattacaaagacaaaagcactattacgttaaggaaaggactggagtttgtatgttagcgtcacatgcttacatgtatacagcctgcacattttcatgtgtgtgggggtgctaatcagtgtacatgtgtgcatgtggagggcagaggtcaacctcagctgttctttctcaggtgctgtccatcttggttttcttttgagacagtctctctctgacctgggtcttgccaagaaggctcagctatctggcagtgagctccatggatcctcctatctccaccttcccagttctgggattaaaagcacagaatgtggttggttttatagagaagctgaactctctcaagccctaaggcctgaacagcaagcactttactgactgagccatcttccaaccctcaggctcactgtttaatggaggacctttttgtgagcctctcaagaaagcagatgctgcaacatggttttccggacactctgttctggagcagaatgaaaggacacaggatagcagtgctgtggaaggggcagagtctcatgcattcagagcagaagcaaagccattttccccagcaagtgttaggtgtaagtcttcaaaggaaaataagtaaacaactccagtgcattactgtgctacggaaactgtcatgaaaaaaaaaattgccttgggttgtcaaaatacaggaacagaaagttcccacatagaacaacagagcaagcagaacagtgttgaaaacaggtaacatgagagtgtggcacgctgagtgtggaattattgatggcacagaaactgagagggacaaagaagaatcaagaagaggctcttgagaaattcaagctcacagggaggcgtagagctagccagatcataaatgtgtctagttccatctagatgacaggggaggtgggatatactcagaatatggaaactcagaagagttgattcggggagaagaggagacatgctgtgtggagaagcagggaccttggctggacactgtggcctgcccatgccatgggaatagctggcttgatttgtgccaagcttcgtggtgagcatttccccgcttaatgcttaaaggttcccatttgagatggattcggtgcacgtcaagagaggaagccgtgaaggccacagttagggcagcattgaatcttgttcgatagaacctgcgtttggtgtctataggtggtttggtttcaggcccagctttcatccttgtgagcccatgtcttcctactgtgagagtttgctccagttcagtgactagccactgaaatgtgcctatattcctgatgtcccgttttttcctttctcatctgccttggtaccaccaccttagccacgttcaacgatccttatgtggtcactcctttaaacccgcccacccccatcttggcattagaaatgaacctcagagatgtgcctggcaagctccctaggcaaactctttgccactgagccacagcccagccctctgaagaccgtcctgtgaatgtgtttggctaagcactggtcttgttcagtttcctctcctcctaagatgaaccaaattattatgggcccctgcctgccttgtatttgtagcttgtaatatgtgtttcctttgtaggaaggaatttaacatctctgccgtgcatcccaacagtgcttaatgccacattgtacacaccgtttacacttttcatactcaattggctgacctcaagaagggaatattctaatccaaagatgtaatcacaacccacatcccagtttatggaaattggagtaaagttgcccacatttgtaatagagaaagagaaaggatcacgaggaaataatatctaaggaaaatggtatagtaagagaaagaatattctggaaccaaagagctgtgagcactctggaagaattggatcacttgtgtgtcagaaatctttaaccctgtaacagaggtggtaactatagcaacatgctttagagtaggctgtacctcaatgtaggtgtagagtgggctgtatctcagtgtgggtgtagagcagggtgtacctcagtgtgggtgtagggcagcattcttttcccttcttagctaatgtgcgcatattctttacaaactgatacttgtttagctagctcctttaagtaattgagagggaaaaataacattaaattcagggacgtttctatgttttgttatttggtagtatttgcagaagcaggagctgcccctacacattttattattttacttagttttatttcaagagcacagcatttactgagtactgcttttgttttatgcggttaaagtcctctttgttttaagacctttattcctccattccccacctttttttttttctgtgttaatgtctatactagtaagaaccagatcacacagagagaaaatcgctgcccaaaatagttttgttaatatattacaactaattgggcaaaacccctccaaattccaatctgtggtgttccacaaaaatatgtggtattcgagctggagtaatggtgcagcggttaagagtactggctgctttcccagaggacccaaatttggttcgactcactatcactcctgttccaggggatctgatggcttcttctggcctcaaagggcacagcacacatgtggtacacaaacatatccataggcaaacactgatatgtgtaaaataagaatatgtttttaaaaacatggtgtttgacctgtttagcgttgacagatgggcctctctaaaatcaggggctaaagagacccctgctcagcacccacaaatactaacagggaggtcagcatcctgaggccggctctcctgcttgaacaggaagtaaatggaacttccgactgtggtccctccccttttttgtactcaaagtggatttagtactaagttaactactaacatttctggaatctgagaaagattattagttactgggtttactgacttttattctcatcacaaagagtgagcggatgtggatccctttattgacacagggaaagaattaagttttcttattgctaataccactgtctctagtacacagagagcatttcctgtggtgtcccttctcaggggtgattatgaaggtacaatctttgcatgcttgtaggaaatctgactgggggcagagcaagagtgcaagaaaaatagaattgtctgtcttcaagccataggtaatacttagatgacatgttagattttcttcatctcaagcagaagtggaagactgacttcacaaagctgcaagccggcagtcttaagagactcataaatgcccctgcctcaatccatctgcctcctaatgagtgggctggtttccataaaatagattttttttggggggtggttttgagacagggtttctcttcggctttggaggttgtcctggaactcactcttgtagaccaggctggtctcgaactcgcagagtctgcctctgcctcccaagtgctggtattaaaggcatacaccaccactgcccggcaaaatagatttatttttaaggataaaaaattagctcgagccaggatgggtatgtggatgcgtgagtgtacgtgtgcgccggtgagcatgtgtgtgtgagcatgtgtacgtgtgtgtgcatgtgtgtgtgcatgtgtgatagttctgtgtaagcacacagtggtgctgctctgatagaaaagctgcaaactttacccttttgtgtttatcccaaatcttactttcccaggtaaaatctttccaaaattcttattattttttttttttttagaccagagtgagtcacttcacattgttggaatccacattgtgcttatttcagctgtgtccttcttccaggccaggagtcatatgggtggctcatcccctttccctccctccttgtcagcctgtcagttggacacacaccagctggttcttagtgcactgaggcaagctctctggacgtaggattaaagcataattttgttgagaaaaataaattgtatttagatacccagagggactggggtctgtgccaggcactttaagtctaggatatgaatttcacattgcaggtgctccctcatttccagtgccccccacttcttgagtgtatgaagagcatcctttaggggatgacgcttagtggataaatgatggcacatggtgtgtcatgggacaattatgtcactttcaaattaggacacttgcagaggatagttgtgaacacactattcacagggacgagtcctcaggccattaaaatggcaggcctgacattatccaccacggggaggaaaaagtcctgtgggttagccatcttgagaagtctttggtccacacactggccaggctaggaagggtttgggcattaggttccttggtctcccgccctcatagcctctgctctgtggccagggtcccccatcaggaatgaaactgtaagtaggaggtggggagggcactgatagacaccacacaggacagtatctgataacagggtgggaaacacctctgggtggccagtgagaagatcatgactatacagatgggcttctcagccaaccaaggatctcccacttgtatggggacgagggcatgagcagacattttcatgccgttaaacgataactgaaaattattgaggcagagcatggtgtgttatgcctagagtaccaacacttggggggctgaggcaagaggcgttctgagtttcattatgagaccatggttctccaatgctcccaaaaccaacagcaatagctgtgtcagcccaaatgaacacacagacgctatattaattatataactgttggccaatgacttgggcttcttattggctagctctgctttaattattaacccataactactaatctgtgtatttctacgtggtcttatcttaccgaagaacgcctgacttgcatcctctcttcccgggctcacatcgatactcctcctctgcctacctctcccagaattctcctcatctcctagccccgcctatcttcctgcttagccaattagtgttttattcgtcaactgataagagaaacatatacagtataacatctcccatcagtccccctcctccccatgttctaagcttggatgcccaccctaaggcctatgaccagcagtgtggccagtgctgccagctgcttctttctaggtcccaggcattgtttcttttgtcccttgattctcatgccctgtcatggctgagtaggtcactgggtccaaaaactgagcccagggctcacaatgacatgtggtagtgtcatttactttacactttggaatttcaagcccaaacgtaatactattatgaagacctctgacacctcaacaaagtttttttctcttaaagacctcctacagttagcaggagcagtagcaggaggctgacattagctgcaacagcaactatagaaggaaaactaaacaaacaaaaacccttcttacttaacatttgaaacagacatgggcatctgcctgccatgttcccaaacatcctacctatgatctggggctccttagccatatgcaaaacctcagcacctctcagaaaagcagtcaagggcattaccaatcctttcttcctttgcttgaaccgcacagcctctgtcaatcactggctaaatctttctttgcacgcactcgtgtgccattatgcaccatgtgacggtctctatgctgtgctttgacaggggggttaatggcactgaaacagctctctgtctaatcagaaccttgcagggggctctacccctgctgtgcccagcacatcctcctgcaaggttgtggagaaggttgctgactgtcttgttacccagtttgtagaattcattatcgcctaactgcatccatgctatacagaagtcacacggaccaagtatttggaagggatgatcttttcccagtacattgaccttgtgtgtggcatgtgtatgtacaagtatgtgtgcatgtgtgtgcgtatatatgtggagggtagtggttggagtcaagtaccttcttcattgatttccatcttaacttttagagacaatctctcattggaacttacttagacaacaagcctcagggaccctactgtcttcccccttccaggtcatgcccagttttttacacgagtactggaattgaactcaggtgtttgtgcttgacnnnnnnnnnnnnnnnnnnnnnnnnnnnnnnnnnntctccatctaaacaagtcaggatgactgtgctaagggtgttgtctttctgatttgtctgctctgtttataggagtgtttttcctacccacgggctattcttcccgaggctcacaagcgccatgtggcatgcccaggatttaacctggggtgggaatcctgaggtccttacgggataggtgagcagtgctgtcaggtttggttatgaggttggtgatgagtgtgggagaagacaggaaaaattccagaaacagcaggatggagtctgtgcttgattgccccctggaggggcaaggtctgtaggtacctctgcttattgtgtttgtcttggctttgtgccttacttatttcttggggaatgagaactctttattaaaaaatctaaggagacattgggcctgtgttacagctgagatggagtgaatccattactaacagtacacactatgagtcaatgtcccaagtattcttaagggtggctttaaaattaattgtttttgtattaaaaatttcaagtccagctattgcgggagatctagggtgctttccagaactctgcttccttccccaccctggttctctacagctctggctcaaaggcctcccaagggcaggctcaggtctctgggggggagggcagggaggttggggatgggtggtgtcccctacacctgcattgttttcagaggccagttggatgctcccagaacgccctgtatttttaaaattctgctcagactgagaacttggcagcatgttcacttgaactgtgaacttctggacttaggtgggtccctgtaaagttttatgtcttaaaaacactacaaaaagccaggatggaactttccttccagtgggcagcctgtcctgggagtcagaggcccttttctgatgtgtgtcccagaaggcaaagccaaagttttgagtttgaataatagacttaatagtcttaggttttaaatgacattgttttctcactggaagtcggtcccataatgactttcagatctatttttggaatcctgagtcctgtggctgatgacagatggctgtggagtagccaacacagccactatctttcctgaaatgataaaggctttattgctgaagcatcttgtctctatagatgtataattaattatgaacaagaaataaattgtatagctcgtggcatatttatttggtacagcattttataaacacgattattcactggtgtttctcagttctgcctttattacatgatgatctgataattcaggatgagaaatagctgcattaaggacttggcagagagttttattacaaattttagattattttgtaataaaatagtaccagtgatgtggcactttagctcacaatcatagtttcacacacacacacacacacacacacacacacacagtgtttttccataaaagttggatttcgagtaggaattttaaatgtttaaattgtttagtttttttttttgtttgtttgtttttttttgagacagggtttctctgcattactttggaggctgtcctggaacttgctcagtagaccaggctggcctcgaactcacagagatccacctgcctctgcctcctgagtgctgggattaaaggcgtgcaccaccaacacctggcttaaattattttttaaaataatgtattaaatgtccttccatggcaccctcctcctagaattgcagaggtggtagtgataccacatgctctcccagctgtgtgatactctgtataaggccatatagactggagagcacatctgtcactgtacagtccagggttttgctgtcacaaggagcatttttgcagccttcctttacatgtttgttgtgtgtgcacacagactaggatatgtacttttttcgtatgtaagtgagtggtgtgtgtgcagaggccagaggaggacactgggtatctcttactctaccttcttcctttgagacagggtctctcactgaacccgtagctaggctgccagccagaaggtcccagcaatgttctgtctctgctttaccgtctgcagccatgcctgacttgttatgtgggtcctgggatctgagtttgagtcctcatgatgcaaggatagcactccactgactgagccatccttccagcctctgactgactccttttcaaaggtctcgttttggtttttcacctttgtacatgttcttcaaaggtgagatgtgtgtagattctttttgtttgttgtgcttggggtgtatcatgaacttgaggaatttcccatctggaaattcaatacagttatgctttggtgtttcctctgaggcttctttttttttttttctggtttttctttgtggggcctcctgttaaatttgctaaactttcttactattcccttatttctacttctcctgctctcacatctaatctttttgtctgtttttattttattctgggtgatagaagcatgcctgattccacttaatcacttctctcatctttctttgtctagttcataaatctgccccgtggagttttatgcttcagtggcataccccttatctttattgtttattatttttagaagccttcattgttttattcagatctacttagactttttatatgatttttcttttcatgctttttgtgtgtgtggcaattctttaaacactatagagggagaagatgtgaattatagaaaagcacgcacgctgacctgtctggcaccatgttaactggggaaacacacacacacaaaaaccccaagagtcctgttgtcctagcttctgggaggggaggggggtcaggaagaacccaagttccaggccatcctgaaaaacttagggagcccttgcctcaagataaagtaatagaaaacaacaacttccaatgtggcctgtggattatagtctaggatcctgcataactttgtttttgaaagacagggtttcactatgttccttggctagcctggaactcataacgatcctcctgcctctgcctccacacctgggttttgcataacctttaaaggcatgaggagacagtgtgtaaaccaagctgtggaaagtttaagctgtgaagctggagtaatacagtttcccagcaggatcggcacatgggtccaaacattgcagcagtgtggtatatatgtccacacttcacgcttcatgtctcactcatcatctgggttccatctcctccatgttgtgtgtatgtatggcttcagtgctgccaaggtgctttgcatctgcatagtggactctggatgtttattagacagctcagacaattctggcttccctgccccgtggattcctctaggcccctttctgtggctttttgtgcaactgcagatgtgatggtgtgttacataggcttcccatcacaaatactggaggacacagtcgtgagcagggaaacctgtttgtgctcatggtctcagaggcctcagctgtggccagccggctccactatttttaggcctatggcaagagataaacattacagagaaagggcatggcagaggaaactgtgtggtatcaggaagcaaagaggagtaacaacatccggcagaagatacacacttcacaggtgcctgcaggtaccaccttccgcaccgactcagttctgttcagacctcaagtacattactagataaacctcacatcacatctagtcctgtctggaaatggcacgtgggagggcaaggcaaaaggactggtgcaggttcaaggccaggctgagctacacagtgaggcttgtcttaaaaaaaataaaatctgcaagtaagttagcacgcttttcaaattgccactcgagccatagtgagaacctgatggggttgttaggaggttgtgtgtgtgacacactgaggagagttgccctgtaacaaatactttgtggatttttattattactctagccatgcttattgaaagtgaacagtcatggatgtgttttcttatgaggtgaatgcataataaaaatcaacctatgtgtcagtggtgaatattatttgttgttgggatgaatctgggtccaggcacgggctacgtggctgtgttgaggcttctctcacaaaggggacagatagggagacactgatagtagcatttttcttgtggctgtgctgcccctgtctcccaggctactctagggtcgggaaacacattccatggtccaccagtcatcactgtttcctgcttgctaggcctgcctgcccacactgcctggcaggccaccctctatttgctgtcttcaccccaggcctcagaaggactatctagcctctgcttctaagtaatggttcctaaggcaatgaccttcatttcctgagtttggggggatgccaataggcaacttgggtgtggtaagctgtaacaggcttaggcagcttcatctaaggccccgctgcacacagggacatggctgagccctccgtggctctcccatacaggggctggtgagtgccgggctctataccatagtctgagtgcccatcctgaacccactagaggtcttctggaaccttctaaagttcttgcgatcagaattgggggtttgcagaaaggacccttttggagtcacatgtcagccttctgaagcttatctcccagcagcccggctggcacttctcactcacatgagctccttagaaacagctggcagtcccggggccactggggtggggtggaggttcgtaagcagccttccctgtgtgcctgggtacccagcaggcaggcctggcccaagaatacatctaatgaggcaataaaaacaaaattaagttaaaatcacctaggaaaaatgggtttgtctgtgagcatgactgttggagattatttctgttagactattgaggcagatggctccactccctaggcaggagatcctggcttgtgtaaaatggagaaatgaatggatattgagttggtgtgtatctttttctgactgtggatgtcatgtgaccagcgtgttcaagctccagccactgtggctttcactgtgatgaactgtaacctgtagcggtgagctaatcccccaaagcagaagcctcccatttaaagtttccgctgacacagtattttatcacagaaagacagcaatgctgtctgttgtagtcataagccgaactggttacacctttcagcattgttcttgttagacgtgtcagaaaaacggtcttgtgtggctatgatacaatgccacaggctgggtagtttatgaagcacagcagggtgttctccctactgaaaatggaagcattcacaggttaggtctctgtttctgtttctacctggcacctcgaacacagctgtctggagaggaactgtggtacacccttctatatccagagagcaacacagagagagccaggccatccatgaagcgtccatcctatgcttcaaataacccccactcacccacactccttaacactgcagcatgagtgcctaagtctgaagcttgtgacttccgaggaggggggcagcaaagtcaagctgtaccaatgtggatggatattcatgatcggcattttctctaagtgagcaatgcagttggcagtcgtaggaagacagcttacagtgttgtgtgtggtgttgaggctcagaatttccaacaagaaaagtgggcttttggaaactgtccagctgtatatactggcaatgaaaagtaggaccctgggtaaatgggaagagagggagaagccggagaggaagacagggcggtgtaggggaagtccactcataatttgtggggctggcaagtttggagtgatccctgcctgaggattgggcagtggggcagggttttttcttgagaggcaagattcctttttgagtggcccaagttttctcctaaggccttaattgctagataaggcccaccattcgccagtgaccctaatgtgttagtcagatattgaaagtccttggttttggcattggaacatgaaaggtggtgccctccatactggtgcaatcagagagtatggtaccgagttagaacttagtagagatgtgtttgctttaataaaccgttttttactttcagaagataacccccccttttaaaaaaccttttaacaatagtaacttttctatttccttaaaaacaacctacatagggctcagggaggttagactaaaaatgtctgaggtcacagtggttggtgatagacgctgatctctgtacgttcgggtttctgtctcatagttcctgagagacccctgaaataggagcctagtttggtgactgcagagaaaaatcagccacagactgattggtgcaaactgattggcaggcagagggagttccaggagccagggacttacaagggactgctgtgtccttgcaggcctggagggttcctgctgaccttggcaatgtggtgcaggctctggggttaaggacattcagttcgaagccatctggctttgtgtcggcttctggttacaaagtggtagtggaaataagggaacacagaggaacatgacagaccctgaattccatgcattggagacctgtctgctagcaaggtcataaagtgcattgctgtggacgccttctctgtggcatctttcccttttgtcatttaaccctttcgctgggggcagtccctcgacacgacttttcttctctgtgatgaggagaggggagtttggccacagaggaagggaagtgtttggccggtgttggttcacggtctgagagcacagtaggtcatagcagggaagtcactgcagccagagcgtgaggcagctggtcagtctgtggaagtgaccagttaggaagcagagagacagatgaatgctggcactgagcccaccttttccttttttttattcagccaggaaacccagcctatggatggtgccacccacatccaggggtggtttttctctccttggttaaaacttttgggaaactccctcccagacctgcccagagctgtctcctaagtgattctaaatccagtcaagttgacaatgagtattaatgaaccagtcttacaggttagcagaacaagtcaggcaaagtcagtctttagtagaatttgtgtagtgcaaaggcgttgtgaaggcagggagctctgggcacactctgcatttgcacatccagaaaagtgtcttccagctgagtggtcacagcactgtgtgcacccaattcctgcaatgaagagatgggaggagacaaaaaagctctgggacaatggggatttatacttttttttcttgtcgagtttttgttccctttcttttgaataactgttagaaaattcttgctcatttttttttttttaaatctgagcagcaacttgtatgtacctatcattctagctcctgtgggagtggggcaggggaggtaggaagaatacaagttccagtccagcctggacagattagggagcccttgtttcaagataaagaagtagaaaacaagaaccaagtattgcttggtagcagagcacttgcaaagcatgtgtgaggccctatactcactcttcattattatcattgttagttttggtgcagacacttgaacccgagtccttgcaccttctcagcaggcaaacactctatcaatgagccccatccccaggccctgaatgtctacaaatttcaatttatttatttaatggaaatgtatttttatacttttgttttgttttgttttgttgagacagggtttctctgtggcttggattctgacctggaactagctcttgcagaccagactggtctcaaactcacagagatccgcctgcctctgcctcccgtgtgctgggctaaaaggcgtgcgccaccactgcctagcttattttctttcttatttgtgtcttggtgtgagagtcttttcttgctttgttttcctttccaccctcctgactatattatttatttcaaattccaaggccccagatattgctggaaagttgtttacatgctctatcatgacctgggtgtggtggtttatgcctgcaatacaaatacctgggaagctgaagcaagaggatctcctgggctacagagtgagaccccattctcaacatgtttatcctccctaagaataaaaataaaaaataaaactcataggctattacactcacacacacacacacacacacacacacacacacacacacacacacgtccttgaaatatttctacaaaaaaaatgaggctaagaagatgaatgtctggtaattcgaagtcagagttggcagcatcattatgtgaatttaagtattaggactaaggcacccaggtcctcaaagctactctgcccagttgtctcccaccattgaaacatctctaccatactttcttcatgtttgcattatgtgcatgcgtgtgtgtgtgtgtgtgtgtgtgtgtgtgtgtgtgtgtgtgtgtgtgtgtgaagccactgtgagggagcccctaggccagtacttctcgatcatcctaaagctgcaatcctgaaacacagttcctcatgttgtggagacccccacccaaccataaaattatttttgttacttcataactgtaattttgttactgctatgaaacatattataaatactattgaagaaagaggtttgtcaaaggggtcgcaacccacaagtgagaaccactgccctggggtgtgaaaactagctacaagctcactggatcggccatgaagctcatggtgaccaccctcaccggttgaataattgatgtgtctcacatatcatatgtctccctggtccccagaaagtattgaagagccagctgccaccacctccaggaatggagactccagagccaaggggttaccctggcctgtattctttgatgactggtgtcctttggtcctttaagtaaccttgcccttaccacggtccaggtgtcttgttgggttacattttatacaggaagcatctgggattcaagaaagtgtgatgccctaagccagtcacctgtgtgccagtcattctttccacacagacctggagagcgctgctctattctctggattcaggaagcaaggatcagagagttgaaggacctaggccacggcacacaggaactgtggtgtgcttatgactttttttactctggggctattggccaggttccagtgaaacacttccatagtaagaataggtggcgccgagtatccagtgagcaggacagggctgcagaacagtttggggaaggctctttctactctgtagcatgtgggaggccttccactggcccaggtcttactctctgctttctggttctgcaacataaagccagtgagtcagaacccaagtgatgggggttgtccttctgtacatatgtttctcttattggttaatgaataaaacactgattggctgattggccaggcaggaagtataggcagagctaaaagatgaggagaattctgggaaacataggcagatggagttgtcatgcagagcctgggaagagaggacgctcaaggtgttccccagtaagccaaggccacgtggaaatatatagattaatagaaattggttaataattaaggcagagccagccaataagaagccctagtcatcggctagcagtttcataattaatatagtatgtgtgtgtttacttggggctcaagagctgtgggaccaaccgggacagaaagctcacattacacccaagggcctgcagagggtcttcttttcagtgataagaaagacaagatttggccaaagttgctgggccatgagtcaaggtgggtgtgaaaacattgtctgacagaaagagctcctactgggcccttctggacagggcaggggctgttgaggcccccgactgttactttgcctcttcctgcccagcagctgctctgtagagagtggaggggacacacgggagctcaacagggcctctctatgtgattctttctcccaagtgtcggggtggctgcaaagcagagagctccaggtagaaacagccaaagcctgaagggtggggatccctgagcgatggaagatgaagcagagtaaggatagggcatgaagtggagactatccaccccctgcaggcagcggatgctgacttccaggaggcagagtccaggacagcaagaggatgagtggagacgtgattgaaaagatagagagatggattaagtgggttctgagccgtttttccctcattggacgcacttgctcatatgcaaattgcgaagttcagagttgaagaaagcaggaatcggtaattgagacgctaaaaagctaagctctgagctcctgccattgtattagggtatttttattgttgtttttctgacagaatacctgccaggaacagcttgggggtgggggattaggtttactgtgggctcatggtttcagagtgtatcggttcatggcggtgggcaaagcgtggcagccagagtgactccgtccacggtggcgggagtggtggcacagcactgtcataccctgatgggttgggatgcaaagttcaggctagaagcagatgcaatcaaagcccacaggaagccccgaggcttctgggaaaggtgtggagagagagaaacagtttccatatcaaggtcacaaagcttcatcttttcttcctccttttctccgcagacgtttgtcatcctctgtacctatttggagatgtcctttaagttcccatccctggtgacagcctgggaaacacaaaagctctaattaaagactgtcctgagccacactttctggaggagcgcggccaagcagtggccccataacctgcaccaagacctttttttcgggtcctccaggggtgcgctcaggctggggcttaagccctgatctctttttcgtgggggagagcattgttcatcccaggcctgattaacgtctcaagccgcgttttcaactttgcttggggttaagaggtagacggacccgcttaccacaaggaagacaatacaggcacaactgcatctcatgaaccacactcatgtgccacacagagatatccagagcagagacctagacgtgtctccaacgggctggtttgccccagctgccccgagacagctacctgctccttagtctctgggatctgctcagaactaggcagggtcctctctgccaccctcccgtcaacacagagggcccagcaaaggggggagatgatgaacataagaaagagaactctcaagtggctcactttcttcctgctcctcgtcttcctcacatcctttgtcttgaactactcaagcaccggggtgcccactgcctggttctccaagcacatggtcctgggattctcggacaacttacgcaagctcatcaagtcacagccctgcacctgtacacgctgcatcagccagggcaaggtctcatactggttcgaccagcgtttcaacaagaccatgcagccgctgctgacagcccacaacgctctgatggaagaggacacgtaccagtggtggctggtgagcagagtaggggctggcaagggtgagaggaggcaaatgctaggtctggggggacccaagggcccaccaatcatctggcagcatccagggtgtcatttctttcagtcagcaactgtttattgagcaactattatgtgtaagtcagagaaaaaccctactgctttccctcctgtggctcccatgacaaatcaccacctggtgggttaagacatcagaagggatcacatggcacagtcctggaggccaagggatttttacccccatggctttttcctactgctgcagctgaccatttgtggtacccacatctgcaggatccaacctctgctcccatgttgcatggttttcctgtgtctttggtgtcctctcctgggaagggcgcgtggccttggctctagggtacactctgagtctatgttcatctgccctgccaccagtagcaaaactagatcttagcaggtgttgggaatgagaaatgcagtcattattgctgtcctgggtgtctagggattggcccttgtaactgaaggtcagctaaagccctagtctcgtacacagtaggtacccagagagtacctgtagaatggatacatgagctttctccctgtctcctgtcttggggtgggggtggctatcactaaccgcctgtgccttcactgttagtagctgggtttggtagcatcggagccaagctgaccacccatcccctctgtcctccgccccagaggctccaacgggagaggaaacctaacaacttgagtgacaccatcaaggaactgtttcgcgtggtgcccgggagggtgggcctggtgctgggcaagcggttggtgggttgccgacgctgtgcagtcgtgggaaactctgggaacctgaaggactcctcgtatgggcctgagattgacagccacgacttcgtggtgaggtgagcactggacccttaacccaagcctagggatcctcagaggtgcgtgaaacaccttggctcagctcagaaggacacggttccagggccccaggagtgactgacctctgggtctcagttcccccatcatgcaatgagaaagccttggctgggcgggaatttccaatgggctggtgacttagtacctaaggcgtagctattgggtgggcaacactgatttgaagcctgtgcttctgtggctcaaatctacccccacccctaccccaccccggatggatggatggatggatggatggatggatggatggatggatggatggatggatggatggatggatggatggatggatggatggatggatggatggatggatggatggatggatggatggatggatggatggatggatggatggatggatggatggatggatggatggatggatggatggatggatggatggatggatggatggatggatggatggatggatggatggatggataaatggatggataaatggatggatgggtagatgatggatggatggcttcatgtccatagaccccttccctggctctcagtatacctagtatcagtgggaatgcccacaatgagaggccaagtcatgttggggtcaggctgacttcagttcaaaggtgtatcttggtagacagctcatctgggttctggatcataaaaaaggttcacctggtaggtgcaatcacacaggtggtcagttactagagggcaagacccacccccacttgcatttatttaaaaaacaaaaataaaaacaaaaccaggggctggagagttaatgaagcaattaagagcactggctgctcttccagagggcctgagttcaattcccagaaaccacagggtggctcacaaccgtccgtaatgagatctggtgccctctctggcagcaggcgtacatgcaggccgaacactatatataataaataactaaatctttttaaaaggccaacaaacaaaatagccttggtggcctctgttttgctgaactagggatagaacttggattcgtgcatgctaggcaagctgtctccccttgagtttctcaggctggacttgaatttgccatcctcctggctcaacctcagtagcggggttttcagacctgctctactgtgcttgtgtggcctgtgtctagagtgtccccattgttcacatggggaaactgaggcctagggaacgaagaggctcacctgtggttatcattcagtggactccagctgcagcattcttaccaagtgctctgttttcctctcctcccaggatgaacagggcacccacggtgggctttgaggcagatgttgggagcaagaccacccaccatcttgtgtatcccgagagcttccgggagctgggagataatgtcagcatggtcttatcttattgagaatgccagactcatgtatcctctgtttatttttttttgttttttttgtttgcctgtttgcctgtttgttttctaaagagagagaaagtgtgtgtgtgtggagttggatggatgaggaagtgaggaggagttgggggaggagaaagtgtaatcagaatatattgtaaaaattttaattgaaaaactattttcagttaaggaagaagggaaggagggagggagggagggagggagggaagaaggaaggaagaaaggaaggaaggaaggaaggaaggaaggaaggaaggaaggaaggaagggggaaacctagcaaggggatagcaacaggagggcagggtgtaccagggcaagtgagattctgagttgattgctgcccctctggagagttaatggccctccttttcctggtgcacagagggagacacacttgtaaatggagatttctttgtggatgcatggtttcccttacagaagggttatttctcttctgttttcaaagctttttctgtgtctgcagtttctcagaatagctagctcaaaataaaccttatcctaggaagcatattttggggtaacatatgctagtctaagaatactagcaatagataactagaaaaaaaagcaacccattctgagcttgctcaagaataggcctagacccttggggtttgaggaggcccggggaggaacggggcaaacacttcccacagcagcctgtcagcaatgctgcccctgcgtctcctccctggggtggacagttcctaagctagcaatacttgtcttgccctgacctttcttctaccagcaggcttcatttactaaagaacttcttttcccaaacaatcaatcaccttcagtttggttagcctttccttgcacagaatagttgtcagtcttattattttgcataaaaccatcactcttcccttgtgggtggctttctgctcatgtagcctagtgatctgcccttcaagagcagaaactgtattgttagaaaagtttccccaatgcagaggacatgagggagaagaaaggttgagtcaggggaagaatagaagataacaagaatggagctgggtggtggtggcgcatgcctttaatcccagcacacgagaggcagaggcaggtggatctctgtgagttcaagccggtgacttcttttccaagatgtggtgttgtgatggtggcacagagctacacagagtacccagtccctggcacttgtgaagcctcactgataaggacgagtcctcaaagtgggtctccagaacagccccaccacctgggaacttgccacaggtgtgactcttcaggagtacccaaacctgctacagctggcccagggtagaccagctctcacaagcccctgaagggtagggcatgtgtaggctgcagttttgttttgtttgttttgatttgaactattcctgggagcttcccaaagccatactcacctctttctctccacacctctgtccttgataccataatagagggagacacttttggtttacagagaaatcaggcactagggaaatgtctgtagatctacaaagatgacaccagctaacaatctaagcaacagaggagaggcttccttatatgccctcccctgataatgagattgatgactgacttatatgccacccgatagccctcatccagcagctggtggaagtagaagcagacacccacaactaatcactgaactgaactggaatccagttacagagaaggacgagtgaagagcaaaagggtccagaccaagatggtgaaacccacaggaacagttgacctgaacatcggggagctcttgctccccagactgatagctggaataccagcatgggactgatccagaccccaggaacatggctttcagtgaggaaacctcagaaatctacaggacctcctatagtagttcagtacttatccctagcataggtgtggactttgggagcccaatccacatagaggaatactccctgagccaagacacatgggggtgggcctaggccctatcccaatggataccatagactctgatgacaccctatggaaggcctcaccctccagggagaagcataaaggatatgtgataggtagggttttagatgtggggtgggggatggtagaggaggaggggagggagagggaactgggattgttgtgcaaaacaatcttgtttctaattcaaattaaaaaagagagagagagagaaaagaaaagtttcccaaaatctgcaaaagggacgccagctcttaggagctgttcttcacccatactctgtcatatcgcagagttgttcatgacatctttaaccttcttattcttctgtttttacccccaagatagggtttctctgtgtaacagccctggctgtcctagaactcactctgnnnnnnnnnnnnnnnnnnnnnnnnnnnnnnnnnnnnnnnnnnnnnnnnnnnnnnnnnnnnnnnnnnnnnnnnnnnnnnnnnnnnnnnnnnnnnnnnnnnnnnnnnnnnnnnnnnnnnnnnnnnnnnnnnnnnnnnnnnnnnnnnnnnnnnnnnnnnnnnnnnnnnnnnnnnnnnnnnnnnnnnnnnnnnnnnnnnnnnnnnnnnnnnnnnnnnnnnnnnnnnnnnnnnnnnnnnnnnnnnnnnnnnnnnnnnnnnnnnnnnnnnnnnnnnnnnnnnnnnnnnnnnnnnnnnnnnnnnnnnnnnnnnnnnnnnnnnnnnnnnnnnnnnnnnnnnnnnnnnnnnnnnnnnnnnnnnnnnnnnnnnnnnnnnnnnnnnnnnnnnnnnnnnnnnnnnnnnnnnnnnnnnnnnnnnnnnnnnnnnnnnnnnnnnnnnnnnnnnnnnnnnnnnnnnnnnnnnnnnnnnnnnnnnnnnnnnnnnnnnnnnnnnnnnnnnnnnnnnnnnnnnnnnnnnnnnnnnnnnnnnnnnnnnnnnnnnnnnnnnnnnnnnnnnnnnnnnnnnnnnnnnnnnnnnnnnnnnnnnnnnnnnnnnnnnnnnnnnnnnnnnnnnnnnnnnnnnnnnnnnnnnnnnnnnnnnnnnnnnnnnnnnnnnnnnnnnnnnnnnnnnnnnnnnnnnnnnnnnnnnnnnnnnnnnnnnnnnnnnnnnnnnnnnnnnnnnnnnnnnnnnnnnnnnnnnnnnnnnnnnnnnnnnnnnnnnnnnnnnnnnnnnnnnnnnnnnnnnnnnnnnnnnnnnnnnnnnnnnnnaaaaaaaaaaaaaaaaaaaaaaaaaaaaaaaaaaaaaaaaaaaatctctcccttccaggaggcaaaccggagcattggcagtccagtcttcggcctgctactctgccctgcagagaaacaattatcaacatcctcagtcacatgaccgaaatccttacaatttagtcacttctgtgcatatgcatgctgtgtgccctcctcttctctggaggactctggctgatacataggtcatttattaaggtttttactttagatactgaggttggagttgggcttcacacatggtatgtgtaacataaactttagaaactaaaagcatgtgttgattattctgtgctgcgtgcacgcaaagatgatccgtagtccgtaaggctaagatttctttattcagataaacaccagcccaaacgcaagccagagcgtgcccagagctcccaagctagagtggccagagaggagaggctatccacttttgtgctgtcccttgacctcctctgatcacgcccgtgagggcgtggccaggcatacctgtaggggctactaggaggccgggctactaggaggcggggctacagtgtctccctacaagcatggcctgataaagcactaataagctttcattttaaaatacttctgtcagaaatcaaaaccagaaaannnnnnnnnnnnnnnnnnnnnnnnnnnnnnnnnnnnnnnnnnnnnnnnnnnnnnnnnnnnnnnnnnnnnnnnnnnnnnnnnnnnnnnnnnnnnnnnnnnnnnnnnnnnnnnnnnnnnnnnnnnnnnnnnnnnnnnnnnnnnnnnnnnnnnnnnnnnnnnnnnnnnnnnnnnnnnnnnnnnnnnnnnnnnnnnnnnnnnnnnnnnnnnnnnnnnnnnnnnnnnnnnnnnnnnnnnnnnnnnnnnnnnnnnnnnnnnnnnnnnnnnnnnnnnnnnnnnnnnnnnnnnnnnnnnnnnnnnnnnnnnnnnnnnnnnnnnnnnnnnnnnnnnnnnnnnnnnnnnnnnnnnnnnnnnnnnnnnnnnnnnnnnnnnnnnnnnnnnnnnnnnnnnnnnnnnnnnnnnnnnnnnnnnnnnnnnnnnnnnnnnnnnnnnnnnnnnnnnnnnnnnnnnnnnnnnnnnnnnnnnnnnnnnnnnnnnnnnnnnnnnnnnnnnnnnnnnnnnnnnnnnnnnnnnnnnnnnnnnnnnnnnnnnnnnnnnnnnnnnnnnnnnnnnnnnnnnnnnnnnnnnnnnnnnnnnnnnnnnnnnnnnnnnnnnnnnnnnnnnnnnnnnnnnnnnnnnnnnnnnnnnnnnnnnnnnnnnnnnnnnnnnnnnnnnnnnnnnnnnnnnnnnnnnnnnnnnnnnnnnnnnnnnnnnnnnnnnnnnnnnnnnnnnnnnnnnnnnnnnnnnnnnnnnnnnnnnnnnnnnnnnnnnnnnnnnnnnnnnnnnnnnnnnnnnnnnnnnnnnnnnnnnnnnnnnnnnnnnnnnnnnnnnnnnnnnnnnnnnnnnnnnnnnnnnnnnnnnnnnnnnnnnnnnnnnnnnnnnnnnnnnnnnnnnnnnnnnnnnnnnnnnnnnnnnnnnnnnnnnnnnnnnnnnnnnnnnnnnnnnnnnnnnnnnnnnnnnnnnnnnnnnnnnnnnnnnnnnnnnnnnnnnnnnnnnnnnnnnnnnnnnnnnnnnnnnnnnnnnnnnnnnnnnnnnnnnnnnnnnnnnnnnnnnnnnnnnnnnnnnnnnnnnnnnnnnnnnnnnnnnnnnnnnnnnnnnnnnnnnnnnnnnnnnnnnnnnnnnnnnnnnnnnnnnnnnnnnnnnnnnnnnnnnnnnnnnnnnnnnnnnnnnnnnnnnnnnnnnnnnnnnnnnnnnnnnnnnnnnnnnnnnnnnnnnnnnnnnnnnnnnnnnnnnnnnnnnnnnnnnnnnnnnnnnnnnnnnnnnnnnnnnnnnnnnnnnnnnnnnnnnnnnnnnnnnnnnnnnnnnnnnnnnnnnnnnnnnnnnnnnnnnnnnnnnnnnnnnnnnnnnnnnnnnnnnnnnnnnnnnnnnnnnnnnnnnnnnnnnnnnnnnnnnnnnnnnnnnnnnnnnnnnnnnnnnnnnnnnnnnnnnnnnnnnnnnnnnnnnnnnnnnnnnnnnnnnnnnnnnnnnnnnnnnnnnnnnnnnnnnnnnnnnnnnnnnnnnnnnnnnnnnnnnnnnnnnnnnnnnnnnnnnnnnnnnnnnnnnnnnnnnnnnnnnnnnnnnnnnnnnnnnnnnnnnnnnnnnnnnnnnnnnnnnnnnnnnnnnnnnnnnnnnnnnnnnnnnnnnnnnnnnnnnnnnnnnnnnnnnnnnnnnnnnnnnnnnnnnnnnnnnnnnnnnnnnnnnnnnnnnnnnnnnnnnnnnnnnnnnnnnnnnnnnnnnnnnnnnnnnnnnnnnnnnnnnnnnnnnnnnnnnnnnnnnnnnnnnnnnnnnnnnnnnnnnnnnnnnnnnnnnnnnnnnnnnnnnnnnnnnnnnnnnnnnnnnnnnnnnnnnnnnnnnnnnnnnnnnnnnnnnnnnnnnnnnnnnnnnnnnnnnnnnnnnnnnnnnnnnnnnnnnnnnnnnnnnnnnnnnnnnnnnnnnnnnnnnnnnnnnnnnnnnnnnnnnnnnnnnnnnnnnnnnnnnnnnnnnnnnnnnnnnnnnnnnnnnnnnnnnnnnnnnnnnnnnnnnnnnnnnnnnnnnnnnnnnnnnnnnnnnnnnnnnnnnnnnnnnnnnnnnnnnnnnnnnnnnnnnnnnnnnnnnnnnnnnnnnnnnnnnnnnnnnnnnnnnnnnnnnnnnnnnnnnnnnnnnnnnnnnnnnnnnnnnnnnnnnnnnnnnnnnnnnnnnnnnnnnnnnnnnnnnnnnnnnnnnnnnnnnnnnnnnnnnnnnnnnnnnnnnnnnnnnnnnnnnnnnnnnnnnnnnnnnnnnnnnnnnnnnnnnnnnnnnnnnnnnnnnnnnnnnnnnnnnnnnnnnnnnnnnnnnnnnnnnnnnnnnnnnnnnnnnnnnnnnnnnnnnnnnnnnnnnnnnnnnnnnnnnnnnnnnnnnnnnnnnnnnnnnnnnnnnnnnnnnnnnnnnnnnnnnnnnnnnnnnnnnnnnnnnnnnnnnnnnnnnnnnnnnnnnnnnnnnnnnnnnnnnnnnnnnnnnnnnnnnnnnnnnnnnnnnnnnnnnnnnnnnnnnnnnnnnnnnnnnnnnnnnnnnnnnnnnnnnnnnnnnnnnnnnnnnnnnnnnnnnnnnnnnnnnnnnnnnnnnnnnnnnnnnnnnnnnnnnnnnnnnnnnnnnnnnnnnnnnnnnnnnnnnnnnnnnnnnnnnnnnnnnnnnnnnnnnnnnnnnnnnnnnnnnnnnnnnnnnnnnnnnnnnnnnnnnnnnnnnnnnnnnnnnnnnnnnnnnnnnnnnnnnnnnnnnnnnnnnnnnnnnnnnnnnnnnnnnnnnnnnnnnnnnnnnnnnnnnnnnnnnnnnnnnnnnnnnnnnnnnnnnnnnnnnnnnnnnnnnnnnnnnnnnnnnnnnnnnnnnnnnnnnnnnnnnnnnnnnnnnnnnnnnnnnnnnnnnnnnnnnnnnnnnnnnnnnnnnnnnnnnnnnnnnnnnnnnnnnnnnnnnnnnnnnnnnnnnnnnnnnnnnnnnnnnnnnnnnnnnnnnnnnnnnnnnnnnnnnnnnnnnnnnnnnnnnnnnnnnnnnnnnnnnnnnnnnnnnnnnnnnnnnnnnnnnnnnnnnnnnnnnnnnnnnnnnnnnnnnnnnnnnnnnnnnnnnnnnnnnnnnnnnnnnnnnnnnnnnnnnnnnnnnnnnnnnnnnnnnnnnnnnnnnnnnnnnnnnnnnnnnnnnnnnnnnnnnnnnnnnnnnnnnnnnnnnnnnnnnnnnnnnnnnnnnnnnnnnnnnnnnnnnnnnnnnnnnnnnnnnnnnnnnnnnnnnnnnnnnnnnnnnnnnnnnnnnnnnnnnnnnnnnnnnnnnnnnnnnnnnnnnnnnnnnnnnnnnnnnnnnnnnnnnnnnnnnnnnnnnnnnnnnnnnnnnnnnnnnnnnnnnnnnnnnnnnnnnnnnnnnnnnnnnnnnnnnnnnnnnnnnnnnnnnnnnnnnnnnnnnnnnnnnnnnnnnnnnnnnnnnnnnnnnnnnnnnnnnnnnnnnnnnnnnnnnnnnnnnnnnnnnnnnnnnnnnnnnnnnnnnnnnnnnnnnnnnnnnnnnnnnnnnnnnnnnnnnnnnnnnnnnnnnnnnnnnnnnnnnnnnnnnnnnnnnnnnnnnnnnnnnnnnnnnnnnnnnnnnnnnnnnnnnnnnnnnnnnnnnnnnnnnnnnnnnnnnnnnnnnnnnnnnnnnnnnnnnnnnnnnnnnnnnnnnnnnnnnnnnnnnnnnnnnnnnnnnnnnnnnnnnnnnnnnnnnnnnnnnnnnnnnnnnnnnnnnnnnnnnnnnnnnnnnnnnnnnnnnnnnnnnnnnnnnnnnnnnnnnnnnnnnnnnnnnnnnnnnnnnnnnnnnnnnnnnnnnnnnnnnnnnnnnnnnnnnnnnnnnnnnnnnnnnnnnnnnnnnnnnnnnnnnnnnnnnnnnnnnnnnnnnnnnnnnnnnnnnnnnnnnnnnnnnnnnnnnnnnnnnnnnnnnnnnnnnnnnnnnnnnnnnnnnnnnnnnnnnnnnnnnnnnnnnnnnnnnnnnnnnnnnnnnnnnnnnnnnnnnnnnnnnnnnnnnnnnnnnnnnnnnnnnnnnnnnnnnnnnnnnnnnnnnnnnnnnnnnnnnnnnnnnnnnnnnnnnnnnnnnnnnnnnnnnnnnnnnnnnnnnnnnnnnnnnnnnnnnnnnnnnnnnnnnnnnnnnnnnnnnnnnnnnnnnnnnnnnnnnnnnnnnnnnnnnnnnnnnnnnnnnnnnnnnnnnnnnnnnnnnnnnnnnnnnnnnnnnnnnnnnnnnnnnnnnnnnnnnnnnnnnnnnnnnnnnnnnnnnnnnnnnnnnnnnnnnnnnnnnnnnnnnnnnnnnnnnnnnnnnnnnnnnnnnnnnnnnnnnnnnnnnnnnnnnnnnnnnnnnnnnnnnnnnnnnnnnnnnnnnnnnnnnnnnnnnnnnnnnnnnnnnnnnnnnnnnnnnnnnnnnnnnnnnnnnnnnnnnnnnnnnnnnnnnnnnnnnnnnnnnnnnnnnnnnnnnnnnnnnnnnnnnnnnnnnnnnnnnnnnnnnnnnnnnnnnnnnnnnnnnnnnnnnnnnnnnnnnnnnnnnnnnnnnnnnnnnnnnnnnnnnnnnnnnnnnnnnnnnnnnnnnnnnnnnnnnnnnnnnnnnnnnnnnnnnnnnnnnnnnnnnnnnnnnnnnnnnnnnnnnnnnnnnnnnnnnnnnnnnnnnnnnnnnnnnnnnnnnnnnnnnnnnnnnnnnnnnnnnnnnnnnnnnnnnnnnnnnnnnnnnnnnnnnnnnnnnnnnnnnnnnnnnnnnnnnnnnnnnnnnnnnnnnnnnnnnnccgccccccccccttttttcccctagactttacaaaaatgctctaagcaccttgaggatgaattggtttctgttgttgttgtttttgtttgttttacaatgatagttagactgaaagggcttggcactttcaaatgctacttaggatttcattcctgtcactgactggaacatccaaatcgggtcagcagagacaagcagaggtgtggactagatgctgagggtgaggatgtgctcaaataaatacagggcttggttaaccattcggtgttccaccccataatcaatatgttatgaacacagtgcggatgagccgttaagcatccacacagcataatcccactccccacagtggatgagcaaagagtctagagcgtgggttccctgcagaccataggacacagaagaggccacgcaattctagaaggctcagcaagtctagaaggtaaccgttattcatttcccagtgtccctgcaaccatcctgacaaaggggggagcctggcccaggaggtggctcagtgatggcagagctgtgcgagcattgggacaggagttcagatcccgaggacccacttgcaggctgggtgtgcttggcggttttctgtaattccagcctcgggaagctgatacctgatcctcagagcaaacgggctggaaaggctagccggatcggcgagctctgggtttgactgagtggcccctgccttgatgaagattgggtaattccagactccaaccgcaggcttccacgcgcatgcgcacaagcgtgctaacatttgcacggaaaccaaaccaaaccaaaacccccaagctgtacacacatgcatacctagaagagaaaaaataaaagcctgtgattctcagtctcctggtccgtgcagtttctgaagctttgaagttcacgcctttgacctctgtggctgaagcagcggaatggaatctccgcctttgacctctcgggaggctgaagcagggggatctccgagttagacgccggccagcctggtctgcacagcggaccctccctgcggaccattcggagcccagagccacgctctgtgtgcgtcgcttgagaagagataccctcaggacccaggctggagtgcggaataactgttctctaatttaattgaagcttgactgtccctgttctgggacagacagacagacgacagacagctccacgtttgtttaccgccagttttggggactgcctgctaatcagtccctggtatcccgttagggttctttctagtgcccgagagcccagaaagatcatcatcctacagatgaatgaagtacatttacacaagcactttaagtgcattttaattgtaaaaataaagatgtgcatgagatgggatgtttccattctagcctgctgttttggtttgtttgttttttcaatgcgggcagttgaacctaggatcttgcccgtgctaggcgggtgctctaagaaatggacctacatgttcagtccctactaattctaaagtgtcatttataagctagagatgtggctgtgttggtaacatgcttgtctagagttggggaagcccagggttcaatcctcagtaccacacaaacctggcttgtaataagctcattctagcactgaggacacgagacaagcagttcggggctatctttggctgcacagaaaatttaaaaccttccgggactagagatcgctctgtgattaagagaaacactgctctttgccggagattgttctcagcactcagtcagatccggtagctcacctctgcttataaccccaacttgaggggtctccacctctgtggaacttccaacctctgtgggcactgctcccacacagatttataaaacttctcatctttggatgtgtgtggcaaaactgtcctggaaatgttgtttgagcaggcaaaatggcaaaattggagaactatttaacttttctggctcactggcattgaagtactgggaaataaattattttcattttacctctaagctgcggttatgaagacaaccgagttctcttataattagtttctttgcaagccttgcttcagtgttagtttccttgttttagatttgctgtttccgtaaacttggggttttctaaaagagaaaattatagccgcacttggttttaaagaaacaccctggcaatagaaagcttgacttagtgctcatgtcataatacacttggccacaggttcctaagttaggggtgacatttcagtatattctctaaattatttcccttgggggttagaataacattcccatttttttgtttttgtttgtctgtttttgttttccgagacagggtttctctatgtgtagtcctggccaaataatcccatttttataccttgttaactttccgagttcttttatttcccgattctttggggaggagatgactgacgtctaaagtttctactgatttttatcgacctctggtcattcagtcccaatcctggaatactaaaggaataacgaaacaacattggttcagttgtcagcaagggtaaccaaaccctgcttgtacccatctttttcaaaatgaggtgaccatacatcagggtggttccctgcactccccctatgacgaggcatttcggcaagggggggggggggaaaccaaaccacagacaaccagaatgaagtttgcttcctttttttttttttttttaattcaacatgctttctaaaactggaaggataaaggaatacaggtgggccagaatgaagctggcttcctcttttaaaactcaacattgctgtcctaaagtaaaactccaagtagaaacgaatacaaacggcctctcccccccccacgccccatgtccctccgcgtccgcttcacccgctctgcttggccgccagcctcttgtctctctcttcggcgatggtcaggcggatccccttcccccgcggcagcgagatccacggcttgttgcccttgccgatcacgaagatgttggagaggcgggtggcgaagccgttcccgttggcgtccttcacgtggaccacgtcgaaggagccggggtggcgctcccggttggtgatgacgccgatgcgccccaggttggcgcctccggtcaccatgcagaggttgccggtgtcgaacttgatggcgtcggtgatcttgcccgtgtccagcgagatctgcacggtgtcgttgaccttgatgagcgggtcggggtagcggatggtgcgcgcgtcgtgcgtcaccaggtgcgggatgcccttggtgcccacgaagaccttccgcaccttgcagagcttgtacttggcctcctcgggcgtgatgcggtgcacggcgaagcggcccttggtgtcgtacaccaggcggaagttctccccgctcttgtcgatgctgatgacgtccatgaagcccgccgggtaggccacgtcggtccgcaccttgccgtcaaccttgatgaggcgctgcatgcagatcttcttcacctcgtcgcccgtcagcgcgtacttgaggcggttgcgcaggaagatggcgagcggcaggcactcccgcaggcggtgcgggcccgaggacggccggggcgcgaacacgcccgtcagtttgtccagcatccagtgacgcggggcggccacacgcttcaggtgcttcttcggaccgcgggccatggcggggcggcggcagcgagggcgagcgagagggcgagcaggcgggagcaggcccttctcctaacccagagcacaagtcgaatgaggcgggcggctgcgcgcgcagtggctggaaaccccgcccatctgggtcttttnnnnnnnnnnnnnnnnnnnnnnnnnnnnnnnnnnnnnnnnnnnnnnnnnnnnnnnnnnnnnnnnnnnnnnnnnnnnnnnnnnnnnnnnnnnnnnnnnnnnnnnnnnnnnnnnnnnnnnnnnnnnnnnnnnnnnnnnnnnnnnnnnnnnnnnnnnnnnnnnnnnnnnnnnnnnnnnnnnnnnnnnnnnnnnnnnnnnnnnnnngcgggaaaataccaagataagtatgcgataagctatcttccttctggaagagtgcagcctgcattacagggaaaagtaagatcaacaaaacttgcttggatactttttgtttgtttgttttttgtttttccagacagggtttctctgtagccctgactgttctgcagctctgtagtccaggctggcctcctcgaactcacagagatcctcctgcctctgcctcccgagtgctgggattaaaggcctgcgccacgattcccaggccttgaatacgtatcttgtactattctttatattctttttatttttttattttttgagtctgttagtgtgtaaatcagaggatggcttttttcccccaccatgtgaggcccgagaattgcacgtaaactcctgggccatcagcatcaggtacatgaggatcagagggtgagtttattgtctaacccgctgcagcttctgaatgggtacagtgctcaggtaacaccaggcaaggactatacaggcctaggaggcaagaaacttccaggcaagttcaccttgcctcaaaggatgctgagcaaaatggagccggcatcaacacccatcatgcatggtatttcacttttaggtcttgaacctccatcttggcatccttacattctgattttaggcttagctttgagacactttcaggagtgtacccagtgctgtctagcagagagccagcagggagcttgctgttgctcatcctcgaccctgaactgttgtccaggcacttctcttggcccctcactgtccacactcttacgttttcagtgtctctccggcctcaccgtccacactcttacgttttcagtatctctccagcctttggccaagcatcgtttctcctttgtagtttcttttcctttcccacgtcatgtcaacaccttctctgatctgtagcccttcatcttttgttgccttcctggggcagggtggagaggagccagtgcacagactcacatcctgattctgctgatgactggttcactttttaatgccttggtttccctagtaccacttgattcctaattacatgaaggtagaaaaagagttgaagtgtttggagcagtttctggcccctgctgtgcgctcagcaaacatgagctgttatttaaatgttagattatgcatttattcctttcatgtaatacttctagggcctggctctgttcctggaacttttcctgtcaaattgaatatcgttatgtgagtaacttgtcacttttcatagcggtgaagttgtagtaggtgttctcctcatttcccgaattgatcaggttgtgttgggaagccctgagcttgaatctgtctcagcatgtgtccctgatctgtttgtgatctagaggatgtatctcaacttcagacgtcttagggatatggagacggctttgctgacagtgattggagaggagaaaaatgtgtgcattgaaggcacagacttgtgttctacctcccatctcttacttcctgtcagaccttaggacaaagtacggggccattaatgccacaatttcccctcttgcaaaagggaaatattaatagtgtccatgtagtgggcacgtgatcagggtcacgtgtaacagcctaggatacacagtaggcagtcactaaatggtaacctaaagttaccacccactgtatactgggacccggggcctcttcaagaccaaaacatgctcttaattactgttgggtgtctgcaggcccaaacaaaaggtccatgctttttagtaagaacagcccctgatcctgtcacagcaaggggaacatggagagaacatgggagcacacagtacagtgactgacacctgtcaagtgcacttgtggggctgtgactgaaagacaaggctgacatcaccacgatgacatcattccttgtagaaataattaaaaaccaggggtgctgactaaattaattgtggagggaaagtaaaatggttcctctgactaaattaatgaagcctgatttcattgacttttgacatagaaggaccatgactttctccaagtcagtttacgtttcttggcacacgtgtgtgtgtgtgtgtgtgtgtgtgtgtgtgtgtgtgtgtgtgtgtnnnnnnnnnnnnnnnnnnnnnnnnnnnnnnnnnnnnnnnnnnnnnnnnnnnnnnnnnnnnnnnnnnnnnnnnnnnnnnnnnnnnnnnnnnnnnnnnnnnnnnnnnnnnnnnnnnnnnnnnnnnnnnnnnnnnnnnnnnnnnnnnnnnnnnnnnnnnnnnnnnnnnnnnnnnnnnnnnnnnnnnnnnnnnnnnnnnnnnnnnnnnnnnnnnnnnnnnnnnnnnnnnnnnnnnnnnnnnnnnnnnnnnnnnnnnnnnnnnnnnnnnnnnnnnnnnnnnnnnnnnnnnnnnnnnnnnnnnnnnnnnnnnnnnnnnnnnnnnnnnnnnnnnnnnnnnnnnnnnnnnnnnnnnnnnnnnnnnnnnnnnnnnnnnnnnnnnnnnnnnnnnnnnnnnnnnnnnnnnnnnnnnnnnnnnnnnnnnnnnnnnnnnnnnnnnnnnnnnnnnnnnnnnnnnnnnnnnnnnnnnnnnnnnnnnnnnnnnnnnnnnnnnnnnnnnnnnnnnnnnnnnnnnnnnnnnnnnnnnnnnnnnnnnnnnnnnnnnnnnnnnnnnnnnnnnnnnnnnnnnnnnnnnnnnnnnnnnnnnnnnnnnnnnnnnnnnnnnnnnnnnnnnnnnnnnnnnnnnnnnnnnnnnnnnnnnnnnnnnnnnnnnnnnnnnnnnnnnnnnnnnnnnnnnnnnnnnnnnnnnnnnnnnnnnnnnnnnnnnnnnnnnnnnnnnnnnnnnnnnnnnnnnnnnnnnnnnnnnnnnnnnnnnnnnnnnnnnnnnnnnnnnnnnnnnnnnnnnnnnnnnnnnnnnnnnnnnnnnnnnnnnnnnnnnnnnnnnnnnnnnnnnnnnnnnnnnnnnnnnnnnnnnnnnnnnnnnnnnnnnnnnnnnnnnnnnnnnnnnnnnnnnnnnnnnnnnnnnnnnnnnnnnnnnnnnnnnnnnnnnnnnnnnnnnnnnnnnnnnnnnnnnnnnnnnnnnnnnnnnnnnnnnnnnnnnnnnnnnnnnnnnnnnnnnnnnnnnnnnnnnnnnnnnnnnnnnnnnnnnnnnnnnnnnnnnnnnnnnnnnnnnnnnnnnnnnnnnnnnnnnnnnnnnnnnnnnnnnnnnnnnnnnnnnnnnnnnnnnnnnnnnnnnnnnnnnnnnnnnnnnnnnnnnnnnnnnnnnnnnnnnnnnnnnnnnnnnnnnnnnnnnnnnnnnnnnnnnnnnnnnnnnnnnnnnnnnnnnnnnnnnnnnnnnnnnnnnnnnnnnnnnnnnnnnnnnnnnnnnnnnnnnnnnnnnnnnnnnnnnnnnnnnnnnnnnnnnnnnnnnnnnnnnnnnnnnnnnnnnnnnnnnnnnnnnnnnnnnnnnnnnnnnnnnnnnnnnnnnnnnnnnnnnnnnnnnnnnnnnnnnnnnnnnnnnnnnnnnnnnnnnnnnnnnnnnnnnnnnnnnnnnnnnnnnnnnnnnnnnnnnnnnnnnnnnnnnnnnnnnnnnnnnnnnnnnnnnnnnnnnnnnnnnnnnnnnnnnnnnnnnnnnnnnnnnnnnnnnnnnnnnnnnnnnnnnnnnnnnnnnnnnnnnnnnnnnnnnnnnnnnnnnnnnnnnnnnnnnnnnnnnnnnnnnnnnnnnnnnnnnnnnnnnnnnnnnnnnnnnnnnnnnnnnnnnnnnnnnnnnnnnnnnnnnnnnnnnnnnnnnnnnnnnnnnnnnnnnnnnnnnnnnnnnnnnnnnnnnnnnnnnnnnnnnnnnnnnnnnnnnnnnnnnnnnnnnnnnnnnnnnnnnnnnnnnnnnnnnnnnnnnnnnnnnnnnnnnnnnnnnnnnnnnnnnnnnnnnnnnnnnnnnnnnnnnnnnnnnnnnnnnnnnnnnnnnnnnnnnnnnnnnnnnnnnnnnnnnnnnnnnnnnnnnnnnnnnnnnnnnnnnnnnnnnnnnnnnnnnnnnnnnnnnnnnnnnnnnnnnnnnnnnnnnnnnnnnnnnnnnnnnnnnnnnnnnnnnnnnnnnnnnnnnnnnnnnnnnnnnnnnnnnnnnnnnnnnnnnnnnnnnnnnnnnnnnnnnnnnnnnnnnnnnnnnnnnnnnnnnnnnnnnnnnnnnnnnnnnnnnnnnnnnnnnnnnnnnnnnnnnnnnnnnnnnnnnnnnnnnnnnnnnnnnnnnnnnnnnnnnnnnnnnnnnnnnnnnnnnnnnnnnnnnnnnnnnnnnnnnnnnnnnnnnnnnnnnnnnnnnnnnnnnnnnnnnnnnnnnnnnnnnnnnnnnnnnnnnnnnnnnnnnnnnnnnnnnnnnnnnnnnnnnnnnnnnnnnnnnnnnnnnnnnnnnnnnnnnnnnnnnnnnnnnnnnnnnnnnnnnnnnnnnnnnnnnnnnnnnnnnnnnnnnnnnnnnnnnnnnnnnnnnnnnnnnnnnnnnnnnnnnnnnnnnnnnnnnnnnnnnnnnnnnnnnnnnnnnnnnnnnnnnnnnnnnnnnnnnnnnnnnnnnnnnnnnnnnnnnnnnnnnnnnnnnnnnnnnnnnnnnnnnnnnnnnnnnnnnnnnnnnnnnnnnnnnnnnnnnnnnnnnnnnnnnnnnnnnnnnnnnnnnnnnnnacaaaaaaaaaacacgaacgcacacgcgcgcacaccccacacacacacacacacacacacacacacacacacacacacacacctgtacccctccagactctctaaagcccattcagggacagccactgtgcaccctgctatggcagctgcagtgaccctggcctggcctcatgccaaacactctgctgtggtttcagaagggaagaaaggacacagagaagctctggaagatggacctacccagaacttgttagcagcaagctttattttctctaattagccagttctgagcatggaccacttccagagattcttatgagccagaaagaggacgagacctgcttttgagtaaagctgtcgcttctctgcagttccaaagcacttcctacactacaggggcctcacacctccagtgggcagactcaaggtggacctatctctgccggacactagcccactcaagtttactgaagaggcactgtctggaccaaagtttctctccagtgaaaagccctcattcagtggcagatcttaagagagaaattctttgagggaagaaacagatgaaagggagtgaaagagctaaatgaaaagggttagggaaaataaggaggaggggaatgcccagggattatgtgatttcagttcaacttcttttctccgctttgactgaagtgtgcaagccttcatggaggataatatggaccctctatgtttgcacagggggcctgtcaacctcagctcttgcttctaggtcacagaagccagccagtcccattcacaaagctgcaactcctcctactttgaaccagtggcaacgatggtggatgcagggtccccattaatctctgacacctgcccccccccaagctgacattcttgcactctgatttgtttcctagggcagaggacagtaagcaagggacaaaattcttcagggtgtatgggaagtcttcgatccaccccagaagcacagtgtattttacttcacataatcttggcatccttgttcttcaaggacaaggcaattgtgagatcttctgtggatcgaaggcattgtgcccctcaaattatataaagtgggtaaatgtaaattcatgttaccagtgttacaggtcaatcaggggcaaatggtaacatttatggttaacagtgctaggtcctgtttcatttattatctccttcattccttacactgttcccacaaagtagatattattgccttttaaatgagcaaagcagatgtgcagagaaatgaagaaacctgttcccacttcccaagtcacaagtggcagaaatggagtgttgaagcccacattctcgggctccaaagccaggctcctggtgtcttctcagagctcagcgtctttacagcgaggaacattgtgctgtagatggttgttcttatatttaatctttcttcccctgtttcaggtgtctgacaggaagcagcaacggcaatttcctgcttaccctgagaccgtttttaaaacgggccattttggtcgtcagttatgtaagtatataatgtatactttgaatatagctagtaagggtgttttcacttagtctcaactcggagacatgttccagattactgaataagctcactatcaacatcacctcatcaggaaggtttgcaggtggcaaatgttgctcttgcgcaaacgtgtgtgggaaaccacacacaggaatctgagggcgtagtgtgaaccacacagggtttaaagtccctttcaaagtgttttcaaagtgacctggatgtgtcagttctctactgctggacacagcacccagtcctggtacccggaggtgtagacacagctacctgctgtgtgtccaggcggctttagttcggaagctcagccgaatgatttcccgtttcctatgtcatgattggggccagggttatccaggcaggcttatctctcagctgtaagaggaggagacagctcctccacttcttgatggaggatcagaacacatgtacagagatggaagacatacatgtaggtggacatttcatcaggtcttctcattccttcaaggtgactgtcattttgtatttccgcctgtggataatgggaggaacaatgcccctcttctccgagcaggacaatccagcttcgttttcgccttacatccttacaaggtcagtggacgtccatcatgcaaactttatttggtatttggtagttttgttgaacatttttattgctgtaaaatcatttgtacaaaataataggtctcactgcactgagatcatacattctggatcctgtccaataatattaaaccacaggccagctatgcatttcgaggaaatattgatcatggactagccatgtacgaggataggaagggaagcacaatacttatgtttgcaattcttttcaacccatgtgagcatctggacagggttgtggctatgattctcactggtacatatttgttttttcaacaagtattttattagatgcttattgtctgtagtgtctattgagtgacttttaaaacaagcattacaaagcagagcacagagatgtgggcagagattggttagacaacaccacctaaaatccaggagtctcagaacaacgaatagaaaggaacaatatttgcaaagatagtgctaatggttccttacatgtcctcagacgttccagagatgctgagttaggaagtgatgttgatgaatgttcctgtgcactgggaagatgtttgacttcttatcagctgcgttgtactgttagagctttaagataaatcacatttccaattttaaaagcttcagaccaatttctgttttataatgtctaagtttagaacagaacatcacctgaactgtagtggtttgagtggatggaggcagaaacccccatttttggtctcatcacttctgtggttatttaaacaagggttgtgctgtgctactatattcctgttcaataatgatggaggtttatctgttttcttcaattgttaaatgttccttgccactaaaggtcggtgttaagtacaatgttctgaatatatttggttacaaatcatatatttattttcttattgaagagttggctcagtggttgatactggtgctaataatgcagcttctcagttgctgttgcaagttacagctgccgatgggaagactcagtaagccagcaaagaccttaagaatcgggatttattacatttatatttggcagaaggacctaaataaactgtgaaatacattttttaaagaaagcttcagattatactctccatagtgttttaaacatgaagatgtcatgtacaactattttcatagtcatatatgctataaatatcttataatgttatatcattttaatgataaatttatggtagtaatctttactattttggtgtatatatttttgaaatgtattataaaacatggtaaaacagtattcaggaccatgaacacaaacaggtgtcaaagtctgacgttagcttccctcttttcaaaatgttgttcagtcttaagctcaacatctgaaactcagctctcgggcaatagcctgtcctttttagatctcgctcatcgacatgcagtctccaggctcctttcttgctatttttagatgtgacagttcatggatgaacagttctggtctgtggcttcttcaacagctactttccacctttaagaggaaacaggacatcaagtcctgtttctccttggtgaacccactatcttcattagagttattggcataaaaagacaccatgaccacagcaactcttataaaggaaaacatttaattggggcttgcttacaggttcagaggtttagtcattgtaggaaacatggtggcatgcaggcagacatggtgctggagagttttgcatttggatgggcccacagcaggaagtgagagtgagccactgggcctagtttgagcttctgaaacctcaaagcccacctccagtgacaaggccacacctcctaatagtgccactccctggcgattaagtgttgaaatctatgtctcaggggtccatttttattcaaaccactatacccatctttcagtttcaggatcatgtccttcaactttggaatgttttcccttcagctttagtgtggtgttgtttgtctttggggtgatttcctactgagctttctgtctatgaattgaggcagctactctcagcttctcaagtagatgtagcatactccatgaattaagccaggatgaggaaatgaaaccaaataatccttcctgctttttgtcttttcctcgatttctttaagggagcttttcatttcctctttaagggcctctatcatcttcataaagttatttttaaggtcattttcttgtgcttcagctacatggaaatgttcaggtcttgatgtcatgtcgtaggatctctgggttctggtagtgtcatattgccctttctgttactgtgttgttgttgttgttgttgttgttttccaactttttaaatttgaattagaaacaggatttttttttttacatgacaatcccagttcccttctcccaccatcctcccctaccactcccccaccactaaaaccctatctatcacatatcctttctgctccccctggatggtgaggtcttccatagggtgtcatcagagtctatcatatcctttgggacagggcctaggcccatccctgtgtgtcttggctcagggagtattcctctatatggaatgggctcccaaagtccacacacatgctagggataagtactgaacttctacaggaggtcctgtagatttctgaggtttcctcacagaaacccatgttcctggggttggatcagtcccatgctggtattccagctatcagtctggggagcaagagtttctggatgttcaggtcagctgtttatgtgggtttcaccagcctggtgtggacccctgtgctcttcactagtccttctctgcatctgggttccagttcagtttggtgattagttgtgggtgtctgcttctacttctaccagctgctggatgtaggctataggatggcatataagtcagtcatcaatctcattatcaggggagggcatttaaggtagcctctcctctgttgcttagattgttagctggtgtcatctttgtagatctccagacatttccctagtgcctgatttctctgtaaaccnnnnnnnnnnnnnnnnnnnnnnnnnnnnnnnnnnnnnnnnnnnnnnnnnnnnnnnnnnnnnnnnnnnnnnnnnnnnnnnnnnnnnnnnnnnnnnnnnnnnnnnnnnnnnnnnnnnnnnnnnnnnnnnnnnnnnnnnnnnnnnnnnnnnnnnnnnnnnnnnnnnnnnnnnnnnnnnnnnnnnnnnnnnnnnnnnnnnnnnnnnnnnnnnnnnnnnnnnnnnnnnnnnnnnnnnnnnnnnnnnnnnnnnnnnnnnnnnnnnnnnnnnnnnnnnnnnnnnnnnnnnnnnnnnnnnnnnnnnnnnnnnnnnnnnnnnnnnnnnnnnnnnnnnnnnnnnnnnnnnnnnnnnnnnnnnnnnnnnnnnnnnnnnnnnnnnnnnnnnnnnnnnnnnnnnnnnnnnnnnnnnnnnnnnnnnnnnnnnnnnnnnnnnnnnnnnnnnnnnnnnnnnnnnnnnnnnnnnnnnnnnnnnnnnnnnnnnnnnnnnnnnnnnnnnnnnnnnnnnnnnnnnnnnnnnnnnnnnnnnnnnnnnnnnnnnnnnnnnnnnnnnnnnnnnnnnnnnnnnnnnnnnnnnnnnnnnnnnnnnnnnnnnnnnnnnnnnnnnnnnnnnnnnnnnnnnnnnnnnnnnnnnnnnnnnnnnnnnnnnnnnnnnnnnnnnnnnnnnnnnnnnnnnnnnnnnnnnnnnnnnnnnnnnnnnnnnnnnnnnnnnnnnnnnnnnnnnnnnnnnnnnnnnnnnnnnnnnnnnnnnnnnnnnnnnnnnnnnnnnnnnnnnnnnnnnnnnnnnnnnnnnnnnnnnnnnnnnnnnnnnnnnnnnnnnnnnnnnnnnnnnnnnnnnnnnnnnnnnnnnnnnnnnnnnnnnnnnnnnnnnnnnnnnnnnnnnnnnnnnnnnnnnnnnnnnnnnnnnnnnnnnnnnnnnnnnnnnnnnnnnnnnnnnnnnnnnnnnnnnnnnnnnnnnnnnnnnnnnnnnnnnnnnnnnnnnnnnnnnnnnnnnnnnnnnnnnnnnnnnnnnnnnnnnnnnnnnnnnnnnnnnnnnnnnnnnnnnnnnnnnnnnnnnnnnnnnnnnnnnnnnnnnnnnnnnnnnnnnnnnnnnnnnnnnnnnnnnnnnnnnnnnnnnnnnnnnnnnnnnnnnnnnnnnnnnnnnnnnnnnnnnnnnnnnnnnnnnnnnnnnnnnnnnnnnnnnnnnnnnnnnnnnnnnnnnnnnnnnnnnnnnnnnnnnnnnnnnnnnnnnnnnnnnnnnnnnnnnnnnnnnnnnnnnnnnnnnnnnnnnnnnnnnnnnnnnnnnnnnnnnnnnnnnnnnnnnnnnnnnnnnnnnnnnnnnnnnnnnnnnnnnnnnnnnnnnnnnnnnnnnnnnnnnnnnnnnnnnnnnnnnnnnnnnnnnnnnnnnnnnnnnnnnnnnnnnnnnnnnnnnnnnnnnnnnnnnnnnnnnnnnnnnnnnnnnnnnnnnnnnnnnnnnnnnnnnnnnnnnnnnnnnnnnnnnnnnnnnnnnnnnnnnnnnnnnnnnnnnnnnnnnnnnnnnnnnnnnnnnnnnnnnnnnnnnnnnnnnnnnnnnnnnnnnnnnnnnnnnnnnnnnnnnnnnnnnnnnnnnnnnnnnnnnnnnnnnnnnnnnnnnnnnnnnnnnnnnnnnnnnnnnnnnnnnnnnnnnnnnnnnnnnnnnnnnnnnnnnnnnnnnnnnnnnnnnnnnnnnnnnnnnnnnnnnnnnnnnnnnnnnnnnnnnnnnnnnnnnnnnnnnnnnnnnnnnnnnnnnnnnnnnnnnnnnnnnnnnnnnnnnnnnnnnnnnnnnnnnnnnnnnnnnnnnnnnnnnnnnnnnnnnnnnnnnnnnnnnnnnnnnnnnnnnnnnnnnnnnnnnnnnnnnnnnnnnnnnnnnnnnnnnnnnnnnnnnnnnnnnnnnnnnnnnnnnnnnnnnnnnnnnnnnnnnnnnnnnnnnnnnnnnnnnnnnnnnnnnnnnnnnnnnnnnnnnnnnnnnnnnnnnnnnnnnnnnnnnnnnnnnnnnnnnnnnnnnnnnnnnnnnnnnnnnnnnnnnnnnnnnnnnnnnnnnnnnnnnnnnnnnnnnnnnnnnnnnnnnnnnnnnnnnnnnnnnnnnnnnnnnnnnnnnnnnnnnnnnnnnnnnnnnnnnnnnnnnnnnnnnnnnnnnnnnnnnnnnnnnnnnnnnnnnnnnnnnnnnnnnnnnnnnnnnagcacacactttgttcctgttcacacctccatcatacctcctgggagcacatactttgctcctgttcacacctccatcacacctcctgggagcacacactttgctgatgcttctctagcaaacacccttggtttgtttcctgcttttgctaagctagctcctgatcacctgacttagctgtgatgtggctgcctctgtgaagtctgtctctgctggctccagatttatcattggctttgtctgtctgccttagtgaaaaattcttctgcatttgtctgctaggactgacatgagccctcctagtacttcaggccacaagtcccaaatcaacatgctgtcagagttggtgtgtggtgagatgtctgtttctgtgtggcaaacaaccacttactctcgtgcgtgcgtgcgtgcgtgcgtgcgtgcgtgcgtgcgtgtgtgtttgcgcatgttgtgtgtatggtatgtgtttgtgtgtgtgtgtgtgtgtttgcgcatgatgtgtatatagtgtgtgtgtgtgtgtgtgtgtgtgtgtgtgtgtgnnnnnnnnnnnnnnnnnnnnnnnnnnnnnnnnnnnnnnnnnnnnnnnnnnnnnnnnnnnnnnnnnnnnnnnnnnnnnnnnnnnnnnnnnnnnnnnnnnnnnnnnnnnnnnnnnnnnnnnnnnnnnnnnnnnnnnnnnnnnnnnnnnnnnnnnnnnnnnnnnnnnnnnnnnnnnnnnnnnnnnnnnnnnnnnnnnnnnnnnnnnnnnnnnnnnnnnnnnnnnnnnnnnnnnnnnnnnnnnnnnnnnnnnnnnnnnnnnnnnnnnnnnnnnnnnnnnnnnnnnnnnnnnnnnnnnnnnnnnnnnnnnnnnnnnnnnnnnnnnnnnnnnnnnnnnnnnnnnnnnnnnnnnnnnnnnnnnnnnnnnnnnnnnnnnnnnnnnnnnnnnnnnnnnnnnnnnnnnnnnnnnnnnnnnnnnnnnnnnnnnnnnnnnnnnnnnnnnnnnnnnnnnnnnnnnnnnnnnnnnnnnnnnnnnnnnnnnnnnnnnnnnnnnnnnnnnnnnnnnnnnnnnnnnnnnnnnnnnnnnnnnnnnnnnnnnnnnnnnnnnnnnnnnnnnnnnnnnnnnnnnnnnnnnnnnnnnnnnnnnnnnnnnnnnnnnnnnnnnnnnnnnnnnnnnnnnnnnnnnnnnnnnnnnnnnnnnnnnnnnnnnnnnnnnnnnnnnnnnnnnnnnnnnnnnnnnnnnnnnnnnnnnnnnnnnnnnnnnnnnnnnnnnnnnnnnnnnnnnnnnnnnnnnnnnnnnnnnnnnnnnnnnnnnnnnnnnnnnnnnnnnnnnnnnnnnnnnnnnnnnnnnnnnnnnnnnnnnnnnnnnnnnnnnnnnnnnnnnnnnnnnnnnnnnnnnnnnnnnnnnnnnnnnnnnnnnnnnnnnnnnnnnnnnnnnnnnnnnnnnnnnnnnnnnnnnnnnnnnnnnnnnnnnnnnnnnnnnnnnnnnnnnnnnnnnnnnnnnnnnnnnnnnnnnnnnnnnnnnnnnnnnnnnnnnnnnnnnnnnnnnnnnnnnnnnnnnnnnnnnnnnnnnnnnnnnnnnnnnnnnnnnnnnnnnnnnnnnnnnnnnnnnnnnnnnnnnnnnnnnnnnnnnnnnnnnnnnnnnnnnnnnnnnnnnnnnnnnnnnnnnnnnnnnnnnnnnnnnnnnnnnnnnnnnnnnnnnnnnnnnnnnnnnnnnnnnnnnnnnnnnnnnnnnnnnnnnnnnnnnnnnnnnnnnnnnnnnnnnnnnnnnnnnnnnnnnnnnnnnnnnnnnnnnnnnnnnnnnnnnnnnnnnnnnnnnnnnnnnnnnnnnnnnnnnnnnnnnnnnnnnnnnnnnnnnnnnnnnnnnnnnnnnnnnnnnnnnnnnnnnnnnnnnnnnnnnnnnnnnnnnnnnnnnnnnnnnnnnnnnnnnnnnnnnnnnnnnnnnnnnnnnnnnnnnnnnnnnnnnnnnnnnnnnnnnnnnnnnnnnnnnnnnnnnnnnnnnnnnnnnnnnnnnnnnnnnnnnnnnnnnnnnnnnnnnnnnnnnnnnnnnnnnnnnnnnnnnnnnnnnnnnnnnnnnnnnnnnnnnnnnnnnnnnnnnnnnnnnnnnnnnnnnnnnnnnnnnnnnnnnnnnnnnnnnnnnnnnnnnnnnnnnnnnnnnnnnnnnnnnnnnnnnnnnnnnnnnnnnnnnnnnnnnnnnnnnnnnnnnnnnnnnnnnnnnnnnnnnnnnnnnnnnnnnnnnnnnnnnnnnnnnnnnnnnnnnnnnnnnnnnnnnnnnnnnnnnnnnnnnnnnnnnnnnnnnnnnnnnnnnnnnnnnnnnnnnnnnnnnnnnnnnnnnnnnnnnnnnnnnnnnnnnnnnnnnnnnnnnnnnnnnnnnnnnnnnnnnnnnnnnnnnnnnnnnnnnnnnnnnnnnnnnnnnnnnnnnnnnnnnnnnnnnnnnnnnnnnnnnnnnnnnnnnnnnnnnnnnnnnnnnnnnnnnnnnnnnnnnnnnnnnnnnnnnnnnnnnnnnnnnnnnnnnnnnnnnnnnnnnnnnnnnnnnnnnnnnnnnnnnnnnnnnnnnnnnnnnnnnnnnnnnnnnnnnnnnnnnnnnnnnnnnnnnnnnnnnnnnnnnnnnnnnnnnnnnnnnnnnnnnnnnnnnnnnnnnnnnnnnnnnnnnnnnnnnnnnnnnnnnnnnnnnnnnnnnnnnnnnnnnnnnnnnnnnnnnnnnnnnnnnnnnnnnnnnnnnnnnnnnnnnnnnnnnnnnnnnnnnnnnnnnnnnnnnnnnnnnnnnnnnnnnnnnnnnnnnnnnnnnnnnnnnnnnnnnnnnnnnnnnnnnnnnnnnnnnnnnnnnnnnnnnnnnnnnnnnnnnnnnnnnnnnnnnnnnnnnnnnnnnnnnnnnnnnnnnnnnnnnnnnnnnnnnnnnnnnnnnnnnnnnnnnnnnnnnnnnnnnnnnnnnnnnnnnnnnnnnnnnnnnnnnnnnnnnnnnnnnnnnnnnnnnnnnnnnnnnnnnnnnnnnnnnnnnnnnnnnnnnnnnnnnnnnnnnnnnnnnnnnnnnnnnnnnnnnnnnnnnnnnnnnnnnaaaaaaaaaaaacaaaaaaaaaaaaaaaatgaagagtttggttcccagagccaccacacagtttcagtagggacagtttggtagctgctcttcctcaggaagcttaccctttctgtgtatttctgtaatgatatcttcctgtcattatgtatttttgacagggcctctcactctagtgctggctagcctggtgctaacagtgggctgggtcctgttacaccaatcagcactcaagacaatccctcacggttatgctcacggaccaacctgatctaggcagtccctcagttgaaacttctccttttcaggtgactctaggctgtatcaagttggcagtagtgcaggctgacctcaaagttgcagtgatcttcctgcctcagcttcccgagttctggggttataagcatgagcagccacttctggctatgaaactctacttcagtcatccctgggttctcaatttaaaaaaatgaatcattaaattttttacatccaatttccagttctctgagttgtatattctatttggttggcaagacattttttcggtttccccccattaataggatttatagtagaaagctggtaaataattttcttttcgttcttgcagagagagagagagagagagagagagagagagagagagagagagagagagagnnnnnnnnnnnnnnnnnnnnnnnnnnnnnnnnnnnnnnnnnnnnnnnnnnnnnnnnnnnnnnnnnnnnnnnnnnnnnnnnnnnnnnnnnnnnnnnnnnnnnnnnnnnnnnnnnnnnnnnnnnnnnnnnnnnnnnnnnnnnnnnnnnnnnnnnnnnnnnnnnnnnnnnnnnnnnnnnnnnnnnnnnnnnnnnnnnnnnnnnnnnnnnnnnnnnnnnnnnnnnnnnnnnnnnnnnnnnnnnnnnnnnnnnnnnnnnnnnnnnnnnnnnnnnnnnnnnnnnnnnnnnnnnnnnnnnnnnnnnnnnnnnnnnnnnnnnnnnnnnnnnnnnnnnnnnnnnnnnnnnnnnnnnnnnnnnnnnnnnnnnnnnnnnnnnnnnnnnnnnnnnnnnnnnnnnnnnnnnnnnnnnnnnnnnnnnnnnnnnnnnnnnnnnnnnnnnnnnnnnnnnnnnnnnnnnnnnnnnnnnnnnnnnnnnnnnnnnnnnnnnnnnnnnnnnnnnnnnnnnnnnnnnnnnnnnnnnnnnnnnnnnnnnnnnnnnnnnnnnnnnnnnnnnnnnnnnnnnnnnnnnnnnnnnnnnnnnnnnnnnnnnnnnnnnnnnnnnnnnnnnnnnnnnnnnnnnnnnnnnnnnnnnnnnnnnnnnnnnnnnnnnnnnnnnnnnnnnnnnnnnnnnnnnnnnnnnnnnnnnnnnnnnnnnnnnnnnnnnnnnnnnnnnnnnnnnnnnnnnnnnnnnnnnnnnnnnnnnnnnnnnnnnnnnnnnnnnnnnnnnnnnnnnnnnnnnnnnnnnnnnnnnnnnnnnnnnnnnnnnnnnnnnnnnnnnnnnagccagcctggtctccagagcgagttccatgacagccatggcatgttacacagagaaactgtgtctcaacaaacaaacaaacaaacaaaaaacaacttaatgatgagtctctgtatccagctctatttattatccactaatatagttttttttccaactatataataaaagcttggtttaatagctggtttctctgacttagcctctttctcagttacttttcctagtgctgtgttaaaattcccccacaaaagcaacttaagggagaaagagtttatttcggctcagtgttccagctgtgcagtccgttatagtgaggaagcagcaatggtgggagcttgaggaccaggaagtggccagagagctgtgactgactgactgggaccagggagcagagagagagctgtgactgctcagcttaagttctccttttcgtttggtccagtctgaggcagagggaacaacgctggtactcgctattagaatgggtcttcccactttggtttacctcatcaggatagtctcatagggcacaccaaggggctagcctagtctaataattcctcacagatatgcctggaggctggtcttttaggtatttttatgtcttgtcaaattgacaatcagcacttaccactaagctatataaatagattctgtcctctggtgtgtctctcaggccattcttaacttatgcatgtcccccattaccatatgcttaagaaactagctccttggtgcagtggtttctcccacaccctgggcactgtgtctccaatttgtcatgaaatgtgttctgatggttcttccgtgtatcccatattagcagttggtcttagaactggtttaaattcaaggttttgtctctgttgttttttttttttaaacaagattatttcatcataggtctgtttaagctttctttctctctttatgacattaaaatgaattagtgagctctatgtacctaaatgttttgtttgttgtttgagacagggtctcactcagtagacctctagcctggcctctgactcatggctatccttctgcctcagcctcttgagtgctggggctgtaggcacctgattcttccatcacattagcgagtgcgttatctgccactaacctaatatgtttagcagtcattatatataattaatatatatatatatatatatatatatatatatatatatannnnnnnnnnnnnnnnnnnnnnnnnnnnnnnnnnnnnnnnnnnnnnnnnnnnnnnnnnnnnnnnnnnnnnnnnnnnnnnnnnnnnnnnnnnnnnnnnnnnnnnnnnnnnnnnnnnnnnnnnnnnnnnnnnnnnnnnnnnnnnnnnnnnnnnnnnnnnnnnnnnnnnnnnnnnnnnnnnnnnnnnnnnnnnnnnnnnnnnnnnnnnnnnnnnnnnnnnnnnnnnnnnnnnnnnnnnnnnnnnnnnnnnnnnnnnnnnnnnnnnnnnnnnnnnnnnnnnnnnnnnnnnnnnnnnnnnnnnnnnnnnnnnnnnnnnnnnnnnnnnnnnnnnnnnnnnnnnnnnnnnnnnnnnnnnnnnnnnnnnnnnnnnnnnnnnnnnnnnnnnnnnnnnnnnnnnnnnnnnnnnnnnnnnnnnnnnnnnnnnnnnnnnnnnnnnnnnnnnnnnnnnnnnnnnnnnnnnnnnnnnnnnnnnnnnnnnnnnnnnnnnnnnnnnnnnnnnnnnnnnnnnnnnnnnnnnnnnnnnnnnnnnnnnnnnnnnnnnnnnnnnnnnnnnnnnnnnnnnnnnnnnnnnnnnnnnnnnnnnnnnnnnnnnnnnnnnnnnnnnnnnnnnnnnnnnnnnnnnnnnnnnnnnnnnnnnnnnnnnnnnnnnnnnnnnnnnnnnnnnnnnnnnnnnnnnnnnnnnnnnnnnnnnnnnnnnnnnnnnnnnnnnnnnnnnnnnnnnnnnnnnnnnnnnnnnnnnnnnnnnnnnnnnnnnnnnnnnnnnnnnnnnnnnnnnnnnnnnnnnnnnnnnnnnnnnnnnnnnnnnnnnnnnnnnnnnnnnnnnnnnnnnnnnnnnnnnnnnnnnnnnnnnnnnnnnnnnnnnnnnnnnnnnnnnnnnnnnnnnnnnnnnnnnnnnnnnnnnnnnnnnnnnnnnnnnnnnnnnnnnnnnnnnnnnnnnnnnnnnnnnnnnnnnnnnnnnnnnnnnnnnnnnnnnnnnnnnnnnnnnnnnnnnnnnnnnnnnnnnnnnnnnnnnnnnnnnnnnnnnnnnnnnnnnnnnnnnnnnnnnnnnnnnnnnnnnnnnnnnnnnnnnnnnnnnnnnnnnnnnnnnnnnnnnnnnnnnnnnnnnnnnnnnnnnnnnnnnnnnnnnnnnnnnnnnnnnnnnnnnnnnnnnnnnnnnnnnnnnnnnnnnnnnnnnnnnnnnnnnnnnnnnnnnnnnnnnnnnnnnnnnnnnnnnnnnnnnnnnnnnnnnnnnnnnnnnnnnnnnnnnnnnnnnnnnnnnnnnnnnnnnnnnnnnnnnnnnnnnnnnnnnnnnnnnnnnnnnnnnnnnnnnnnnnnnnnnnnnnnnnnnnnnnnnnnnnnnnnnnnnnnnnnnnnnnnnnnnnnnnnnnnnnnnnnnnnnnnnnnnnnnnnnnnnnnnnnnnnnnnnnnnnnnnnnnnnnnnnnnnnnnnnnnnnnnnnnnnnnnnnnnnnnnnnnnnnnnnnnnnnnnnnnnnnnnnnnnnnnnnnnnnnnnnnnnnnnnnnnnnnnnnnnnnnnnnnnnnnnnnnnnnnnnnnnnnnnnnnnnnnnnnnnnnnnnnnnnnnnnnnnnnnnnnnnnnnnnnnnnnnnnnnnnnnnnnnnnnnnnnnnnnnnnnnnnnnnnnnnnnnnnnnnnnnnnnnnnnnnnnnnnnnnnnnnnnnnnnnnnnnnnnnnnnnnnnnnnnnnnnnnnnnnnnnnnnnnnnnnnnnnnnnnnnnnnnnnnnnnnnnnnnnnnnnnnnnnnnnnnnnnnnnnnnnnnnnnnnnnnnnnnnnnnnnnnnnnnnnnnnnnnnnnnnnnnnnnnnnnnnnnnnnnnnnnnnnnnnnnnnnnnnnnnnnnnnnnnnnnnnnnnnnnnnnnnnnnnnnnnnnnnnnnnnnnnnnnnnnnnnnnnnnnnnnnnnnnnnnnnnnnnnnnnnnnnnnnnnnnnnnnnnnnnnnnnnnnnnnnnnnnnnnnnnnnnnnnnnnnnnnnnnnnnnnnnnnnnnnnnnnnnnnnnnnnnnnnnnnnnnnnnnnnnnnnnnnnnnnnnnnnnnnnnnnnnnnnnnnnnnnnnnnnnnnnnnnnnnnnnnnnnnnnnnnnnnnnnnnnnnnnnnnnnnnnnnnnnnnnnnnnnnnnnnnnnnnnnnnnnnnnnnnnnnnnnnnnnnnnnnnnnnnnnnnnnnnnnnnnnnnnnnnnnnnnnnnnnnnnnnnnnnnnnnnnnnnnnnnnnnnnnnnnnnnnnnnnnnnnnnnnnnnnnnnnnnnnnnnnnnnnnnnnnnnnnnnnnnnnnnnnnnnnnnnnnnnnnnnnnnnnnnnnnnnnnnnnnnnnnnnnnnnnnnnnnnnnnnnnnnnnnnnnnnnnnnnnnnnnnnnnnnnnnnnnnnnnnnnnnnnnnnnnnnnnnnnnnnnnnnnnnnnnnnnnnnnnnnnnnnnnnnnnnnnnnnnnnnnnnnnnnnnnnnntcaatttaaatatcttccttgggaactgtgtctttttttttttttttctttctgttgaggtcagcacccaacacagtggctaggaactgagagataagttcccaggtgatcagtttaatagatagtttgatgtctttccctatcttcctctaactgaaacgatgacagaacagacatactgtttcctagaactgtggtaagcaagtgtttgccaaatgtgggaatgtatatttcacaactgttctcttcataggttcctgacctattcctacctccttgccttcaatgtgtggcttctgctggcacctatcaccctgtgctacgactggcaagtgggcagtatccctctggtggagaccatatgggatgtgaggaaccttgctaccatccttctggcggtggtgatggccttactgagtctacactgcatggcagccttcaaggtaatctctaagagcaaatagattctcatatcgaagacatatgtctctcttactactgctccttttcgtaatggggtctgggtcaaaatcacatgttactgacttacaaaagtttgaaaattaatttttcctaatagataatatatatttaaaagtctttagcaggtctcatagaccatgcccttcttaattttatcctgtctttatttaaaagatttatttttaattatgcatatatgcgtgtgtctctatgtgggcatgccacatgtgtatagatgcctgtggtggctagagaaaggtgtctgatcccctggagctggagttacaggtggttgtgagctggctgactgggtgctggaagccagactccactcctctggcagaagagcaattgttcttagccactgagccatctctccagctgtgtgtaatttctttgatcatgtccagatgttttgtaagaataaaaatttcctcctggtatagttggctaatatttgaaggaatttaattgatacaatgtcataaaaaatgaaaatacacttacaaatatttaaggtctgattgagactccatatccacttaatgatattaaatttgatggtttcttttccagtcagaaaaaaatatgaaactgaacaaaattattaagttcaatcatttaaaaatgatcaaaggtagaagaaactagaaaatactgattgatgggaaattgacagacattgatgaaatgcctctcacctgggctaaacatgccctggagcttttctttatgactttgatacaaactttacagcgttagaaaagcaccttgtctgaacatggtgtgtttaggaggcttctttccactgggcctcctcttaatagattccttcctatggcctgtcctctaaaatagcctcactgagcgacaggaaatgctgcccagtgggtttcggaagcaatgtgtttgatatgtgttccttatgtcattctcacaggatttcttgagattttaaagagcattcaatgacttttatagccttgcagcatcctgtaaaaggaaaactggataaacagaggaggagaagaaggaggaggaggaggaggagaaggaggaggaggaagaggaggaggaggaaacatggtcacctagcttggcttggctgactgcctcacagtgacagagatcttttctggcagaggccataggtctgtgcctatctgtgtctttagctcagtctcctaatgatctcctcgagatcaggaccaaacacaggctgagctctgagacctggaaaacaaacctagtcctgggatccttaggaagatgaagttgtagctggagcacttttgtgtgggggtaactgcaatgagggcttgaggaggcctctattgtgggaaggaagcctctgaagccccttacctgaagagcctgatgcattcattcctgggacttccgttagtgtcagttcctagccttgctttccccctttaaagtccacatcacgattctcatctttctcctccctggagagtaggcacctggggtgaagagactcccatctagtgtctctgagtaagatcccatattctcaacaaggaggcaggctagagtaagagcaactgttggaaagtagttgtctgcgtgtggatatcccaaccttgttaagaacagatttagagcagttgagtggacaaccccacactcccctagcccccccccccccccccacacacagacagaccaaagaaggcacaccttgctgttgctaaggaagaaagtattagaagctttgctgcccatgtgatctgtcacaactttatccttgaagcacaaattagccaaccaaccctacagccaaaaattgttctaccatagacccatacaattgaactagacacgattccagattgctagaaattatttttgcattttgctcattcaaataataggttatcatgttattgtgacacatttctagaatgtcccttacaaaacctgatgaaataaacatgtgtgttttaacacagtgaatatcaaaattggagtaagcctggaggatgaagacagcatttaatagcgagtggtcttttttcttccctttccctgccttgtgtctatttagttcccgttctttgcacccagcactttcccattcacgtttcctcaattcatagaaattctcctctcaggaaaatagggactcagtctttctagcccataacagcccttctggatggtgtttattgggccccttgatagttgaggctccaaaatgtgctgccaaggtcccatgtgtgaggtcagctggtggggggtgttcttctgtgtatatgtttctcttattggttgatgaatataacactgtttggccaatagaggtaggaagataggcatgggtaggagactggagaattctgggaaagggagatggagagagaccatgaggagatgccatggagagaccgggaagataggatgcgccaggcattctcccgtaagataaggccatatagaaatacatagattagtagttatgggttaataattaagacagagctagccagtaaaagaagccctagccaccagccaatagtttaataattaatatagcctctgtgtgcttatttggggctgagaaggacagctggatctggcgggacaagaaaccaccagcaactgacagctcgaaagtaggctcagtccaggcagctttccagcgctgtctctgccggatcctcctccttaccttcttacctatagccacgctgatcgcgggccacatttttctacctcagtagctatctatcttccatggttgcccttgaccagtacaatagaatgggaatgtcatctgtaacccttttctgaggtgagtttgaaagtaaactttaccctttaccctcatatggtaaagaggtatgttatgggagagacaagctttgccctggaacttactcagagaccctctgctgctctccctcgggcgtgtcatatcattgtgttgccctatgtgataaagagacggcttcccttctgcggttctaactttgtatggtattcacactttaaatgcatgccacaccacctcaagtgaagcctggcccctctgtacaggaggtgtaagaggagagccaccccaagtcctaggaggagggaggccagagtgggtaatgatagcttcactgctcctcacctgtgtctgttcccctcccacagactcccctcccctcctgcaccatgctgcgaggtcagaccagggcacttggtgccttctgacacagcaccatgatagccctcacagaggaacaatgaagacattccaactgtttgcagagtctggtcattgtcagggtcacgatcatcccaaaagcgtggcagctcaactccaggaggacaaaagggctcctgtgtataaatagcagagtgaatgcaaagaaagccactgactgcttcctttgtctctgtagtcaagacccgtgcttgctcaacagtcacagtgtatatgaagttattgttatttatgaatgtcaaccctctacctcatccttaccctgctcccttcatccccagtggcagggaacatctttaaattctttagaacagctgctttctggacttgaatgctacctgggtttcttttctcatcacactgacaaattgaagggaggaaaagcttctttggccccacagcttggatactcagcccattatggcccagccttggtggcaaggcgagggctgcctgctcacatctggacagatctggggacagagaaggggcaggacgattagccaaggccctccacccagcaacccacttcctttagttggactccaccttctgaagtctcagcctcccagaatagctgggttcaaacattcgaacctgtggctgatgttcccaactcagatcatataacaaacactaccatagaagtgtgcagtctctgtgttcagatgtcacagaaggacaggagtgaaatcactagtttaactgtatgtgaggggcacacacagtaaagaaagtgcctacctgaccattccatggtatgattaagggaaaggttttttattgtgcataagagagaaaaaatccataggcatctggaagagcccagagcagcagagagaaaagaaaacagactggacatggcctgggctatattagagagaaatggaagaatagcagaagaaagtgagtgtgtgtgtgtgtgtgtgtgtgtgtgtgtgtgtgtgtggnnnnnnnnnnnnnnnnnnnnnnnnnnnnnnnnnnnnnnnnnnnnnnnnnnnnnnnnnnnnnnnnnnnnnnnnnnnnnnnnnnnnnnnnnnnnnnnnnnnnnnnnnnnnnnnnnnnnnnnnnnnnnnnnnnnnnnnnnnnnnnnnnnnnnnnnnnnnnnnnnnnnnnnnnnnnnnnnnnnnnnnnnnnnnnnnnnnnnnnnnnnnnnnnnnnnnnnnnnnnnnnnnnnnnnnnnnnnnnnnnnnnnnnnnnnnnnnnnnnnnnnnnnnnnnnnnnnnnnnnnnnnnnnnnnnnnnnnnnnnnnnnnnnnnnnnnnnnnnnnnnnnnnnnnnnnnnnnnnnnnnnnnnnnnnnnnnnnnnnnnnnnnnnnnnnnnnnnnnnnnnnnnnnnnnnnnnnnnnnnnnnnnnnnnnnnnnnnnnnnnnnnnnnnnnnnnnnnnnnnnnnnnnnnnnnnnnnnnnnnnnnnnnnnnnnnnnnnnnnnnnnnnnnnnnnnnnnnnnnnnnnnnnnnnnnnnnnnnnnnnnnnnnnnnnnnnnnnnnnnnnnnnnnnnnnnnnnnnnnnnnnnnnnnnnnnnnnnnnnnnnnnnnnnnnnnnnnnnnnnnnnnnnnnnnnnnnnnnnnnnnnnnnnnnnnnnnnnnnnnnnnnnnnnnnnnnnnnnnnnnnnnnnnnnnnnnnnnnnnnnnnnnnnnnnnnnnnnnnnnnnnnnnnnnnnnnnnnnnnnnnnnnnnnnnnnnnnnnnnnnnnnnnnnnnnnnnnnnnnnnnnnnnnnnnnnnnnnnnnnnnnnnnnnnnnnnnnnnnnnnnnnnnnnnnnnnnnnnnnnnnnnnnnnnnnnnnnnnnnnnnnnnnnnnnnnnnnnnnnnnnnnnnnnnnnnnnnnnnnnnnnnnnnnnnnnnnnnnnnnnnnnnnnnnnnnnnnnnnnnnnnnnnnnnnnnnnnnnnnnnnnnnnnnnnnnnnnnnnnnnnnnnnnnnnnnnnnnnnnnnnnnnnnnnnnnnnnnnnnnnnnnnnnnnnnnnnnnnnnnnnnnnnnnnnnnnnnnnnnnnnnnnnnnnnnnnnnnnnnnnnnnnnnnnnnnnnnnnnnnnnnnnnnnnnnnnnnnnnnnnnnnnnnnnnnnnnnnnnnnnnnnnnnnnnnnnnnnnnnnnnnnnnnnnnnnnnnnnnnnnnnnnnnnnnnnnnnnnnnnnnnnnnnnnnnnnnnnnnnnnnnnnnnnnnnnnnnnnnnnnnnnnnnnnnnnnnnnnnnnnnnnnnnnnnnnnnnnnnnnnnnnnnnnnnnnnnnnnnnnnnnnnnnnnnnnnnnnnnnnnnnnnnnnnnnnnnnnnnnnnnnnnnnnnnnnnnnnnnnnnnnnnnnnnnnnnnnnnnnnnnnnnnnnnnnnnnnnnnnnnnnnnnnnnnnnnnnnnnnnnnnnnnnnnnnnnnnnnnnnnnnnnnnnnnnnnnnnnnnnnnnnnnnnnnnnnnnnnnnnnnnnnnnnnnnnnnnnnnnnnnnnnnnnnnnnnnnnnnnnnnnnnnnnnnnnnnnnnnnnnnnnnnnnnnnnnnnnnnnnnnnnnnnnnnnnnnnnnnnnnnnnnnnnnnnnnnnnnnnnnnnnnnnnnnnnnnnnnnnnnnnnnnnnnnnnnnnnnnnnnnnnnnnnnnnnnnnnnnnnnnnnnnnnnnnnnnnnnnnnnnnnnnnnnnnnnnnnnnnnnnnnnnnnnnnnnnnnnnnnnnnnnnnnnnnnnnnnnnnnnnnnnnnnnnnnnnnnnnnnnnnnnnnnnnnnnnnnnnnnnnnnnnnnnnnnnnnnnnnnnnnnnnnnnnnnnnnnnnnnnnnnnnnnnnnnnnnnnnnnnnnnnnnnnnnnnnnnnnnnnnnnnnnnnnnnnnnnnnnnnnnnnnnnnnnnnnnnnnnnnnnnnnnnnnnnnnnnnnnnnnnnnnnnnnnnnnnnnnnnnnnnnnnnnnnnnnnnnnnnnnnnnnnnnnnnnnnnnnnnnnnnnnnnnnnnnnnnnnnnnnnnnnnnnnnnnnnnnnnnnnnnnnnnnnnnnnnnnnnnnnnnnnnnnnnnnnnnnnnnnnnnnnnnnnnnnnnnnnnnnnnnnnnnnnnnnnnnnnnnnnnnnnnnnnnnnnnnnnnnnnnnnnnnnnnnnnnnnnnnnnnnnnnnnnnnnnnnnnnnnnnnnnnnnnnnnnnnnnnnnnnnnnnnnnnnnnnnnnnnnnnnnnnnnnnnnnnnnnnnnnnnnnnnnnnnnnnnnnnnnnnnnnnnnnnnnnnnnnnnnnnnnnnnnnnnnnnnnnnnnnnnnnnnnnnnnnnnnnnnnnnnnnnnnnnnnnnnnnnnnnnnnnnnnnnnnnnnnnnnnnnnnnnnnnnnnnnnnnnnnnnnnnnnnnnnnnnnnnnnnnnnnnnnnnnnnnnnnnnnnnnnnnnnnnnnnnnnnnnnnnnnnnnnnnnnnnnnnnnnnnnnnnnnnnnnnnnnnnnnnnnnnnnnnnnnnnnnnnnnnnnnnnnnnnnnnnnnnnnnnnnnnnnnnnttcctgttgggagcatttttctcttagaacctcacaagcataccccaggaaaaacacgaccccacctcacaaatatgggtcagttttcttctttgatgtcacacctcacttttttgtaaattcactaaacacttgagtgtttgatggaagcaggccctttgatgggcctctcttcattgccttgaaacaaataaatggatgtgttggtatgtacatgtctggacttggaagattacaggtgtttgaaccataaagcataaagagccttgcttttccatcctctgctgcatgccattaaaccagtaaatttaagtggtggtaaactgaacccatagtgaaaaatgagggaagaatcccagacccagtgatttgtgaagagagccctttaactgcctcttgtgagaacagaattatccattaggctctccccatcacacacctcagaagcagaaaagtgggacatgttccttgattggctacacattgtggtagattctggatgaggacattgactgggaacagagcccaaatctacctgatgacacctggatcttgttgtcctttttctcagtgcttaggaaagagggttcctggtcttgtcacccatgcacagagtgacctgaagtaaggcagacccagacctgccatttgtctgataaagcagggtgagctgttgctaagagatgctcctgtaagccagttagtcttcactaggggaacacaaccacgtgtccctcgtgtctcctcattaatcccagagtatagaacaagtgttcatcctctcagacagttccatgtgggtaggtgaaccacagctctctctgcaaataagacaaggaaaggctcttgtctctttcatggcagatagatgttgatggcatcctgcactgggggaggggggtgcctgcttagtagatgtccccgcacaagtatggtaagtaagaaaacatttctgctggccacacacatccgcaggacaaagtgacttagggaacacttctggttcctgctctgcctgcttcctcgaccccaggagaggaagacccaggggacactctactgtatttaaatcaatccatgatcctcaccaagtcccttcctgagacactcttgtgaagttaagtttattgaccttggattttgtggttgcatgagtttggatctggaatgttctccaaaggcgatgtattaaaagcatgatccctagcctgaagtggtaaaaggtcattgtcattctaccaaacaagcctaggcatatgtgacccatttcctgaagcctaggtgtcccgtgaagtgatactgtacacctccaagcttctcctcattcctgaatcccttctgtctgagtgaaccctgagtgtcactcacattgcattcccagaagagtcaagctcaaatttgtaaagtaagtgtgtgtgtgtgtgtgtgtgtgtgtgtgtgtgtgtgtgtgtgtgctgtcaagtgcttgtgcacgtgtgtgcacgtgcataagtgcgcacatgtgggcatgcatgtgcgtggaagtcagaagccaacttgtaggagttagtgttctcctgctaccacatggatctcagttatcaaactcccatcaccaggcttggtggaggcaccttgactctctgagccatctcattggcggcttcatatgtatatgaagtatgtatatacttcacatacaggcggagtatgtatatgctatgtgttatatgctatgcgtctggtcttggacgttgggtttcaggagagtaacgaccatctcaaaccattccttgattccctgaagcagaacatgtgagaaggagcagtgctgtgtagagtactgggcttgtttctcctgatgccctctgttagacgctgtaaggggcgagatttccttgaccatacagcacctcgtgtggcttcctccacactgcaacatctgactccttgccctggcatttccacctacacttgattttggatatagaagaggacaaactttggagttggtcaggtctcgggtgttttgtttttttgttctgttttgtttttgttctgtagttaggaggagtctttcagactagaaagatgacttggtgggcaaagtacttatgaagacctgaatttagactcccacaatccacataaaagtccagcctggtggtgtgtgctggtaactttattgttgggaggcagagcgaggtgagctcattggatagccagcataacccaagcgttgagcttcaagttccctgaaaaactttctcaaaaatgaactgtagagacagatacccagtgtgacctctgccctccatgtaagacgttacttgtgagcacacacattctcacatacacacatatgcaccacacacctgcaatacatatacaccacatacctgcttgcacacacacacacacacacacacacagagagagagagagagagagagagagagagagagagagggagggagggagagagagagagagagtgtgtcactgtgtagcccaggttggacttgacttctcaatccctctgtttgaacttcccaagtgctgggatggcaagtgtacatgccatgcctggcttttagcccttagtttgaaactttcacttcccactcattggagtgacagctaagtgccagaagccacaccctgaagtttaatggtggccttcccccagcatgttcctatctcctcctgttcctgcctccttctgtcctgcactaacctcaggatactaacccctcagcataactgaccctgaggctcacagagggatttgtacattgaatagacccttagaggaggannnnnnnnnnnnnnnnnnnnnnnnnnnnnnnnnnnnnnnnnnnnnnnnnnnnnnnnnnnnnnnnnnnnnnnnnnnnnnnnnnnnnnnnnnnnnnnnnnnnnnnnnnnnnnnnnnnnnnnnnnnnnnnnnnnnnnnnnnnnnnnnnnnnnnnnnnnnnnnnnnnnnnnnnnnnnnnnnnnnnnnnnnnnnnnnnnnnnnnnnnnnnnnnnnnnnnnnnnnnnnnnnnnnnnnnnnnnnnnnnnnnnnnnnnnnnnnnnnnnnnnnnnnnnnnnnnnnnnnnnnnnnnnnnnnnnnnnnnnnnnnnnnnnnnnnnnnnnnnnnnnnnnnnnnnnnnnnnnnnnnnnnnnnnnnnnnnnnnnnnnnnnnnnnnnnnnnnnnnnnnnnnnnnnnnnnnnnnnnnnnnnnnnnnnnnnnnnnnnnnnnnnnnnnnnnnnnnnnnnnnnnnnnnnnnnnnnnnnnnnnnnnnnnnnnnnnnnnnnnnnnnnnnnnnnnnnnnnnnnnnnnnnnnnnnnnnnnnnnnnnnnnnnnnnnnnnnnnnnnnnnnnnnnnnnnnnnnnnnnnnnnnnnnnnnnnnnnnnnnnnnnnnnnnnnnnnnnnnnnnnnnnnnnnnnnnnnnnnnnnnnnnnnnnnnnnnnnnnnnnnnnnnnnnnnnnnnnnnnnnnnnnnnnnnnnnnnnnnnnnnnnnnnnnnnnnnnnnnnnnnnnnnnnnnnnnnnnnnnnnnnnnnnnnnnnnnnnnnnnnnnnnnnnnnnnnnnnnnnnnnnnnnnnnnnnnnnnnnnnnnnnnnnnnnnnnnnnnnnnnnnnnnnnnnnnnnnnnnnnnnnnnnnnnnnnnnnnnnnnnnnnnnnnnnnnnnnnnnnnnnnnnnnnnnnnnnnnnnnnnnnnnnnnnnnnnnnnnnnnnnnnnnnnnnnnnnnnnnnnnnnnnnnnnnnnnnnnnnnnnnnnnnnnnnnnnnnnnnnnnnnnnnnnnnnnnnnnnnnnnnnnnnnnnnnnnnnnnnnnnnnnnnnnnnnnnnnnnnnnnnnnnnnnnnnnnnnnnnnnnnnnnnnnnnnnnnnnnnnnnnnnnnnnnnnnnnnnnnnnnnnnnnnnnnnnnnnnnnnnnnnnnnnnnnnnnnnnnnnnnnnnnnnnnnnnnnnnnnnnnnnnnnnnnnnnnnnnnnnnnnnnnnnnnnnnnnnnnnnnnnnnnnnnnnnnnnnnnnnnnnnnnnnnnnnnnnnnnnnnnnnnnnnnnnnnnnnnnnnnnnnnnnnnnnnnnnnnnnnnnnnnnnnnnnnnnnnnnnnnnnnnnnnnnnnnnnnnnnnnnnnnnnnnnnnnnnnnnnnnnnnnnnnnnnnnnnnnnnnnnnnnnnnnnnnnnnnnnnnnnnnnnnnnnnnnnnnnnnnnnnnnnnnnnnnnnnnnnnnnnnnnnnnnnnnnnnnnnnnnnnnnnnnnnnnnnnnnnnnnnnnnnnnnnnnnnnnnnnnnnnnnnnnnnnnnnnnnnnnnnnnnnnnnnnnnnnnnnnnnnnnnnnnnnnnnnnnnnnnnnnnnnnnnnnnnnnnnnnnnnnnnnnnnnnnnnnnnnnnnnnnnnnnnnnnnnnnnnnnnnnnnnnnnnnnnnnnnnnnnnnnnnnnnnnnnnnnnnnnnnnnnnnnnnnnnnnnnnnnnnnnnnnnnnnnnnnnnnnnnnnnnnnnnnnnnnnnnnnnnnnnnnnnnnnnnnnnnnnnnnnnnnnnnnnnnnnnnnnnnnnnnnnnnnnnnnnnnnnnnnnnnnnnnnnnnnnnnnnnnnnnnnnnnnnnnnnnnnnnnnnnnnnnnnnnnnnnnnnnnnnnnnnnnnnnnnnnnnnnnnnnnnnnnnnnnnnnnnnnnnnnnnnnnnnnnnnnnnnnnnnnnnnnnnnnnnnnnnnnnnnnnnnnnnnnnnnnnnnnnnnnnnnnnnnnnnnnnnnnnnnnnnnnnnnnnnnnnnnnnnnnnnnnnnnnnnnnnnnnnnnnnnnnnnnnnnnnnnnnnnnnnnnnnnnnnnnnnnnnnnnnnnnnnnnnnnnnnnnnnnnnnnnnnnnnnnnnnnnnnnnnnnnnnnnnnnnnnnnnnnnnnnnnnnnnnnnnnnnnnnnnnnnnnnnnnnnnnnnnnnnnnnnnnnnnnnnnnnnnnnnnnnnnnnnnnnnnnnnnnnnnnnnnnnnnnnnnnnnnnnnnnnnnnnnnnnnnnnnnnnnnnnnnnnnnnnnnnnnnnnnnnnnnnnnnnnnnnnnnnnnnnnnnnnnnnnnnnnnnnnnnnnnnnnnnnnnnnnnnnnnnnnnnnnnnnnnnnnnnnnnnnnnnnnnnnnnnnnnnnnnnnnnnnnnnnnnnnnnnnnnnnnnnnnnnnnnnnnnnnnnnnnnnnnnnnnnnnnnnnnnnnnnnnnnnnnnnnnnnnnnnnnnnnnnnnnnnnnnnnnnnnnnnnnnnnnnnnnnnnnnnnnnnnnnnnnnnnnnnnnnnnnnnnnnnnnnnnnnnnnnnnnnnnnnnnnnnnnnnnnnnnnnnnnnnnnnnnnnnnnnnnnnnnnnnnnnnnnnnnnnnnnnnnnnnnnnnnnnnnnnnnnnnnnnnnnnnnnnnnnnnnnnnnnnnnnnnnnnnnnnnnnnnnnnnnnnnnnnnnnnnnnnnnnnnnnnnnnnnnnnnnnnnnnnnnnnnnnnnnnnnnnnnnnnnnnnnnnnnnnnnnnnnnnnnnnnnnnnnnnnnnnnnnnnnnnnnnnnnnnnnnnnnnnnnnnnnnnnnnnnnnnnnnnnnnnnnnnnnnnnnnnnnnnnnnnnnnnnnnnnnnnnnnnnnnnnnnnnnnnnnnnnnnnnnnnnnnnnnnnnnnnnnnnnnnnnnnnnnnnnnnnnnnnnnnnnnnnnnnnnnnnnnnnnnnnnnnnnnnnnnnnnnnnnnnnnnnnnnnnnnnnnnnnnnnnnnnnnnnnnnnnnnnnnnnnnnnnnnnnnnnnnnnnnnnnnnnnnnnnnnnnnnnnnnnnnnnnnnnnnnnnnnnnnnnnnnnnnnnnnnnnnnnnnnnnnnnnnnnnnnnnnnnnnnnnnnnnnnnnnnnnnnnnnnnnnnnnnnnnnnnnnnnnnnnnnnnnnnnnnnnnnnnnnnnnnnnnnnnnnnnnnnnnnnnnnnnnnnnnnnnnnnnnnnnnnnnnnnnnnnnnnnnnnnnnnnnnnnnnnnnnnnnnnnnnnnnnnnnnnnnnnnnnnnnnnnnnnnnnnnnnnnnnnnnnnnnnnnnnnnnnnnnnnnnnnnnnnnnnnnnnnnnnnnnnnnnnnnnnnnnnnnnnnnnnnnnnnnnnnnnnnnnnnnnnnnnnnnnnnnnnnnnnnnnnnnnnnnnnnnnnnnnnnnnnnnnnnnnnnnnnnnnnnnnnnnnnnnnnnnnnnnnnnnnnnnnnnnnnnnnnnnnnnnnnnnnnnnnnnnnnnnnnnnnnnnnnnnnnnnnnnnnnnnnnnnnnnnnnnnnnnnnnnnnnnnnnnnnnnnnnnnnnnnnnnnnnnnnnnnnnnnnnnnnnnnnnnnnnnnnnnnnnnnnnnnnnnnnnnnnnnnnnnnnnnnnnnnnnnnnnnnnnnnnnnnnnnnnnnnnnnnnnnnnnnnnnnnnnnnnnnnnnnnnnnnnnnnnnnnnnnnnnnnnnnnnnnnnnnnnnnnnnnnnnnnnnnnnnnnnnnnnnnnnnnnnnnnnnnnnnnnnnnnnnnnnnnnnnnnnnnnnnnnnnnnnnnnnnnnnnnnnnnnnnnnnnnnnnnnnnnnnnnnnnnnnnnnnnnnnnnnnnnnnnnnnnnnnnnnnnnnnnnnnnnnnnnnnnnnnnnnnnnnnnnnnnnnnnnnnnnnnnnnnnnnnnnnnnnnnnnnnnnnnnnnnnnnnnnnnnnnnnnnnnnnnnnnnnnnnnnnnnnnnnnnnnnnnnnnnnnnnnnnnnnnnnnnnnnnnnnnnnnnnnnnnnnnnnnnnnnnnnnnnnnnnnnnnnnnnnnnnnnnnnnnnnnnnnnnnnnnnnnnnnnnnnnnnnnnnnnnnnnnnnnnnnnnnnnnnnnnnnnnnnnnnnnnnnnnnnnnnnnnnnnnnnnnnnnnnnnnnnnnnnnnnnnnnnnnnnnnnnnnnnnnnnnnnnnnnnnnnnnnnnnnnnnnnnnnnnnnnnnnnnnnnnnnnnnnnnnnnnnnnnnnnnnnnnnnnnnnnnnnnnnnnnnnnnnnnnnnnnnnnnnnnnnnnnnnnnnnnnnnnnnnnnnnnnnnnnnnnnnnnnnnnnnnnnnnnnnnnnnnnnnnnnnnnnnnnnnnnnnnnnnnnnnnnnnnnnnnnnnnnnnnnnnnnnnnnnnnnnnnnnnnnnnnnnnnnnnnnnnnnnnnnnnnnnnnnnnnnnnnnnnnnnnnnnnnnnnnnnnnnnnnnnnnnnnnnnnnnnnnnnnnnnnnnnnnnnnnnnnnnnnnnnnnnnnnnnnnnnnnnnnnnnnnnnnnnnnnnnnnnnnnnnnnnnnnnnnnnnnnnnnnnnnnnnnnnnnnnnnnnnnnnnnnnnnnnnnnnnnnnnnnnnnnnnnnnnnnnnnnnnnnnnnnnnnnnnnnnnnnnnnnnnnnnnnnnnnnnnnnnnnnnnnnnnnnnnnnnnnnnnnnnnnnnnnnnnnnnnnnnnnnnnnnnnnnnnnnnnnnnnnnnnnnnnnnnnnnnnnnnnnnnnnnnnnnnnnnnnnnnnnnnnnnnnnnnnnnnnnnnnnnnnnnnnnnnnnnnnnnnnnnnnnnnnnnnnnnnnnnnnnnnnnnnnnnnnnnnnnnnnnnnnnnnnnnnnnnnnnnnnnnnnnnnnnnnnnnnnnnnnnnnnnnnnnnnnnnnnnnnnnnnnnnnnnnnnnnnnnnnnnnnnnnnnnnnnnnnnnnnnnnnnnnnnnnnnnnnnnnnnnnnnnnnnnnnnnnnnnnnnnnnnnnnnnnnnnnnnnnnnnnnnnnnnnnnnnnnnnnnnnnnnnnnnnnnnnnnnnnnnnnnnnnnnnnnnnnnnnnnnnnnnnnnnnnnnnnnnnnnnnnnnnnnnnnnnnnnnnnnnnnnnnnnnnnnnnnnnnnnnnnnnnnnnnnnnnnnnnnnnnnnnnnnnnnnnnnnnnnnnnnnnnnnnnnnnnnnnnnnnnnnnnnnnnnnnnnnnnnnnnnnnnnnnnnnnnnnnnnnnnnnnnnnnnnnnnnnnnnnnnnnnnnnnnnnnnnnnnnnnnnnnnnnnnnnnnnnnnnnnnnnnnnnnnnnnnnnnnnnnnnnnnnnnnnnnnnnnnnnnnnnnnnnnnnnnnnnnnnnnnnnnnnnnnnnnnnnnnnnnnnnnnnnnnnnnnnnnnnnnnnnnnnnnnnnnnnnnnnnnnnnnnnnnnnnnnnnnnnnnnnnnnnnnnnnnnnnnnnnnnnnnnnnnnnnnnnnnnnnnnnnnnnnnnnnnnnnnnnnnnnnnnnnnnnnnnnnnnnnnnnnnnnnnnnnnnnnnnnnnnnnnnnnnnnnnnnnnnnnnnnnnnnnnnnnnnnnnnnnnnnnnnnnnnnnnnnnnnnnnnnnnnnnnnnnnnnnnnnnnnnnnnnnnnnnnnnnnnnnnnnnnnnnnnnnnnnnnnnnnnnnnnnnnnnnnnnnnnnnnnnnnnnnnnnnnnnnnnnnnnnnnnnnnnnnnnnnnnnnnnnnnnnnnnnnnnnnnnnnnnnnnnnnnnnnnnnnnnnnnnnnnnnnnnnnnnnnnnnnnnnnnnnnnnnnnnnnnnnnnnnnnnnnnnnnnnnnnnnnnnnnnnnnnnnnnnnnnnnnnnnnnnnnnnnnnnnnnnnnnnnnnnnnnnnnnnnnnnnnnnnnnnnnnnnnnnnnnnnnnnnnnnnnnnnnnnnnnnnnnnnnnnnnnnnnnnnnnnnnnnnnnnnnnnnnnnnnnnnnnnnnnnnnnnnnnnnnnnnnnnnnnnnnnnnnnnnnnnnnnnnnnnnnnnnnnnnnnnnnnnnnnnnnnnnnnnnnnnnnnnnnnnnnnnnnnnnnnnnnnnnnnnnnnnnnnnnnnnnnnnnnnnnnnnnnnnnnnnnnnnnnnnnnnnnnnnnnnnnnnnnnnnnnnnnnnnnnnnnnnnnnnnnnnnnnnnnnnnnnnnnnnnnnnnnnnnnnnnnnnnnnnnnnnnnnnnnnnnnnnnnnnnnnnnnnnnnnnnnnnnnnnnnnnnnnnnnnnnnnnnnnnnnnnnnnnnnnnnnnnnnnnnnnnnnnnnnnnnnnnnnnnnnnnnnnnnnnnnnnnnnnnnnnnnnnnnnnnnnnnnnnnnnnnnnnnnnnnnnnnnnnnnnnnnnnnnnnnnnnnnnnnnnnnnnnnnnnnnnnnnnnnnnnnnnnnnnnnnnnnnnnnnnnnnnnnnnnnnnnnnnnnnnnnnnnnnnnnnnnnnnnnnnnnnnnnnnnnnnnnnnnnnnnnnnnnnnnnnnnnnnnnnnnnnnnnnnnnnnnnnnnnnnnnnnnnnnnnnnnnnnnnnnnnnnnnnnnnnnnnnnnnnnnnnnnnnnnnnnnnnnnnnnnnnnnnnnnnnnnnnnnnnnnnnnnnnnnnnnnnnnnnnnnnnnnnnnnnnnnnnnnnnnnnnnnnnnnnnnnnnnnnnnnnnnnnnnnnnnnnnnnnnnnnnnnnnnnnnnnnnnnnnnnnnnnnnnnnnnnnnnnnnnnnnnnnnnnnnnnnnnnnnnnnnnnnnnnnnnnnnnnnnnnnnnnnnnnnnnnnnnnnnnnnnnnnnnnnnnnnnnnnnnnnnnnnnnnnnnnnnnnnnnnnnnnnnnnnnnnnnnnnnnnnnnnnnnnnnnnnnnnnnnnnnnnnnnnnnnnnnnnnnnnnnnnnnnnnnnnnnnnnnnnnnnnnnnnnnnnnnnnnnnnnnnnnnnnnnnnnnnnnnnnnnnnnnnnnnnnnnnnnnnnnnnnnnnnnnnnnnnnnnnnnnnnnnnnnnnnnnnnnnnnnnnnnnnnnnnnnnnnnnnnnnnnnnnnnnnnnnnnnnnnnnnnnnnnnnnnnnnnnnnnnnnnnnnnnnnnnnnnnnnnnnnnnnnagagaacccccacatggtagaaggagagaacctacccccacaagttgttgtatgacctcacatgtacactgtcacaggtacatacacacacagacacacccactcagtcactcactatctatcgtctgtctgtctgtcatctatctatctacctaccagtctatctatctatctatctcctttaagacaaaagaaagggagggaagaaggaagggagaaaatgaatcctagtgatgactagagtctttcaccgatggctctgtaggtttgagaaatacttccgaatttgagctgttggcttatgtctctacaggttcagacttggcccaggggtggtttgtaagggctcctgtgtgctctgtatggaaatctctggttggcagcacaggggtcccttaaccagagtaaccagagcaagcaagactcaggttccatctcctggagaaaaagcatgtagtttctcatttgcttggttttccactttctctgtggcctcatcttgcctccagtgatagaacgtgtttctgttgcccgctactgggagctgcactaaaacaaatgttggaggatgaagtttcaaaatagaggagtgtgtcactcactgtaatgtctgtatctgaaagaatgtaatggttcccaagaaattgcaaacctagcagagattactttctatggcttaatatttctgaagccatgtgtcaattcaaggactttggaggaaaaacaatttatcatgttatttgatacaaaaattgatgtcaaatggtaaggagagattctccttcatcctcacagagcaggggccagcgaactgtgaggcacatgagtcaggtctggccctcttcacagacatgcctattcacttacgtggtggatgcttactctcacacagacagggtgaaggagagctgacagaggcattgtggcctctgtagagatgaaggaacttaccctctgccctccaaatgtctggatatttatgtccaattagaggaattgacaataaagagattgacaggagtaaaggcaaacaaatgtgttcatggacagcacatcaactcagaagctcagagaaggcaaaagcatctgtactctctccccttagggaagaggccagtgggacacataacatgggtggatctataaaggatatgagaggcctgaagaaccagaggtgggttgacacagtgctctgggtgtagacagtgggctgacacagtgctctgggtgtagacagtgggctgacacagtgctctgggtatagacagctgacacagtgctctgggtgtagacagtgagctgacccagtgctctgggtgtagacagtgggctgacacagtgctctgggtatagacagctgacacagtgctctgggtgtagacagtgagctgacccagtgctctgggtgtagacagtgggctgacacagtgctctgggtgtagacagtgggctgacacagtgctctgggtgtagacagtgggctgacacagtgctctgggtgtagacagtgggctgacacagtgctctgggtgtagacagtgggctgacacagtgctctgggtgtagacagtgggctgacacagtgctctgggtgtagacagtgggctgacacagtgctctgggtgtagacagtgggctgacacagtgctctgggtgtagacagtgggctgacacagtgctctgggtgtagacagtgagctgacccagtgctctgggtgtagacagtgggctgacacagtgctctgggtgtagacagtgggctgacacagtgctctgggtgtggacagctgacccagtgctctgggtatagacagtgggctgacacagtgctctgggtatagacagtgggctgacacagtgttagagtgtggtgattggttttcagtctcttcttctgtggtgggagtttaatcttcctcggttaatgtcgtttccctaagcagcttacaggcagttgtatccccctttgattgatccagtctctaggtgggtatgggaacttcacgaaagccctcacatgtgtttctgtgaaaataggattgagagacaggaagaagggagactgggatagggaaggtcagagaggccttaaagacgctgtttcagtagcaggtaaattcagggctcttgggggataatgttttgtgagccccaatatagaaaacatctgccctgtttactgcccatctttttagaggaggagtttgtaatcctcagctttagcattttgtcagattctgcatatctggcttgttgagtgttagcattggggctgtaggcgagttcttcaatttgtctcggtttttcgtttcttcactgaggacatggataacaatgagaatttgtggttcaagtcagaaaacatatgcaaaatacaaccccttgccctgcaaatgctgttgagatctcaaatgacactcttagcactgtgcctggcacagaggacgtgtctgtgaacacccagacacacacaaactgatggtttcagtcactgtcttcatcatccttgtctgccaacactttagtgcaccactgtgcatctgccagggttccacacccccccccttccagctgttctgtcacagggcagctgtggttcctgcaaccagtgtggtctcacgaatacagagctaacacttagtaggtgacatagtgggtgggataggatccagcctgtcatatcaaaaaccatatagcagggcagcatgtggggtcaaggtgctgggtctgaattcctgggctagtctcgctgtccctctgttctctagatatctgacttaattcaacatccttcaccctcttcaccagcgtcttcttggattaagagcccctggcatccatagctttgtgggaagccatggtgctgcccacacaagatgatagcccctaaccttagcaatcttcatgtggaggtgagtagggagagaggaagcctgggaatgcaaatgtctgcatggcgtgttctccatgcatttcaggccttcatgcgtgtgtctgcaggttcttacatgaccatccatgttgaaatacccgtctttctactgcttgacttcctcatgcagcaaagtataacacacatgctctgtacttaatctaccgtttcctcccccatgttccagaattgtgattacagtcttgtttattcactaataagttcttggtgcccgtaatactcttatctacatagtagtcagtaaattataacgaatgagggttggccgtcaaggtgagcttgatccccagcatccatggaaatgtgggaggagagaatcaactccacagagttgtcctcagaccgccacacaagcggtactctcacacaatagtaatgaaaaattaaaattatttttaaaaacaaattataacataggaaggaatggactccagaggaccttcttgtggtcccacaagcatcctgactagcttggaggatgggggaacctggctggggctagaagagcaggcagcaaggaacctcatgcacttgagtagccattatggtcaggcattgcagtaacattagcacaatcagttctacagaaacagtagatttgtagaggagcctcacatctttaaggtcaaatatggacattgtaatgtgagaagactttttttttttttgtattggagaatgttttgctgtgtataaggtaccgaaggacctgtgtcaactgaattcagtacttggggtcatatctgggaacccacctacgtaggtagatggggactccctttagcaaactttatgttctcttgagtctgttctgccagtagcaagctcctctgcatgtgcatgagtggtgggaagaaccatgtgctttcagagatgtgatgctaggccaaagcctgggaaagccgggcagagccagtgaagaaacctcattagtccagctcaggaggcagcctgcaggtggatttggaaaatgggaggaccttagccgatgcactgggaggccttgtaggtggcgtatctctggtcctccctgactactgtctagcccagatgatcctccaggctgctgggtcagacctacaggctctgaattcaggcataccttgtgatggaggcatgaggaaacctgggccagagaatcccctcaggtcccatgtaagactttccatgcctgaggctttgagcctatggctttgcagcaatgctggagagctagtgagccatcctgtgagagctagtgcctcagacagcccacccctgtctgtgacaggagaattcatatgtgtccctctagaacagagcaggtctgtttgtcctaatagcacccataatgagccccaacccacagtgaccgtcttagtcactggtctgttgctgtggtgatttattattgatcatttactaaagcttgcctgaggattcagaaagcaaagacaggcacaagctatagaggtcaggcagcggtgatacacacctttaatcccaccagccacactagatagccatagaagctaggaggtgatggtgtacacctttaatcccagtactagcgaggaatataaaataggagctcagattctagtcttagtttgtattcagactacactcacacactgaggataggatctccccagccttagtagaggtaaaaactctttagtggctggctgctttgatattcatcttgaaccccaatatctgtctctgagattttattattcatgctacaacttggctctagtgaaaatgtgtaaaaacattagattagtacatttttctataccttttaattattgtatgttgtgtttatagaaagataattgcagatatagagttcaactagatatctcaatatatctagatatctaaaccacagcagcatgtttctaagcagaatcctcaaataaagacattgttgctacctgtcataccacttgctcatgattcagagtcttgacactgagcagcatgtagccacttctagatcagctgcctctactggcatgttcagacaaggaggagagtcttccattagtaagtgaacgtacttgagttttgtacccacgaagaccatatgtaatacttgatgtggctatttttcagaaagaaaacaggttattatttaaagggggacatagatgttgtatagtttaaaactggagatagtcaatatgcaggtcattttcccatggcctataaactctgtcattagctgtcaaagacatttaagataaatgattacaggtatcagtacacaaatatatagaaggaataagttgtggtgctccacatcaccttggggtgactgcagagttcaaaataatcccttgttattatatgaagatgtaggaaacaggagctcaaaggttcctacataaagacataatgagcaggaaatgctaattacccatttgatcagtgcatactgtaggcatatgttgaaatattgcaacccgtatctcaatctctctctctctctctctctctctctcttttcctggtggttttgtttgtttgtttgtttttctctgtgatgaaatttttttctgaatacaagcgtgttgctgggttggtattaacagctctggggtagagcacttaccaggcaccctggattagatccctagtatcacccatattggtgtgcatatgtatatttattatgtgtatatgtacatatatgtgaattgtgtacatatttacaaatatgtgaacacatcttatatatatatacataaacacatggatatgcattatgtgcatatattcatatatgtgtttatatgtatgcccaggtacatgtgtgcatatatgtgtgtacatatttacacagacatacatatctttgtgtgttcatctatagctttcagcctttcccaaagtatgaatattggaattagttggaattagtagtgaagaagtgaatgaatgcaagaatgaatgaaaaaataaggtagatgttcactgggctctgctatgttttgaaaataatatatctgagactgggtgtggtggtgtatatctttaatcccagcacttgggaggcggaggcagaggcagaggcagaggcaggcagatctctgtgagtttgaggtcagcctggtctatagagagttctggggcagccatggctgcacagtgagaccctgactcaaaaaaaaaaaaaaaaaaaaaaaaggaaaaaaaaaaaaaaaaaatgtgttgatcttaagcattaatgtaattaacttagtgtacaagtctgggtgtcatttaacagcatagtgtcatcacagccctgcttagcacagagtaactgctgtaagaagataagcctttctgtttatcagaaattataatgggtttcatgttgacactctctgcatgaatacaagggattttgaccacattcattctccattcagtcttttgtcccctgtccactgatcgccttcttttgaactaatatcctgactgctttcatttctttgtttaacaagttttaagatttttattttatttcattttatttttttttatgtgtatgagtatcctgtctgcaggtatgcctgtacaccatttatgtgtctggtgcccacagaagccagaagaaggcatcagatctctgggaactagagttatagacagttgtgagccatcatgtgggtgctgggagtcaaacacaggccctctgtaagggcagccatgctctgaacccctgagtctctccaggcccccttccctttgtgagttccattagggctgttaacaggtttgtttataggatcataaatacttcacccaaggctacaccactgaagacagagtctcttcctaccaccaaatgttttgcttctgcttttttagtgccttcacagacctgataaagaactctggggctttgccctagccttcctcactcaccgaggttctcacagaacacaggggcctctccctcctcatgccttagtctaggggcgttgaagttcagacttcctcctggtctcttggtttaatctttctctcactttgagcagctgactttttatggaagacttcccaaccattctgctattgtattgagcattttccctggctaaagccacacactgggaatggcatcttctatgatgtttactgcttaatcaaaacaacttagtggtggaggtgggaggcagtgtttgctccaaggataataagctagagttcaaaccctctgtagctaatacccatagttaaaaaataagtaaaaacagcaacaacaataaaactggaacacacactgacttgcatcccaaaccttctgtcccttctgatagaagtatgttggaatccaatagctggttactacaatacaaccattgcacagctgtgctggcagggactgtggcctgggaggctgaagatggaggtttctgttccaccaggtcctgccgccctttggccccaaataaacacactgaggctatgttagttataaaacttttggccaatggctggggcttcttactggctagctctctcttaattactaacccatttctgctaatctttgtattgccacaaggctgtggtttacctgtaatctggcatgttactctttcagcagcatggcgtctctccccacatctcctgcccaatcagtgttttattcatcaaccaataagagaaacatatatacagaaggacattccccatcatcaggcctttgaagatggggtgattttgtgtgtgtgtgtgtgtgtgtgtgtgtgtgtgtgtgtgtgtgtgtgttgcaatcaaaataactgatactttaaatacaactttgactctaagtcgtggggaaagctggaggcttgtagaatcttttttctctttaaggctagatgtgcacatcttcatctgtgagaaaacatgctaatctcacttggacacttcacctccagcctctgaggtagggcagggtgaacgagtgactgaaggcaacatctggagttggacttcctaactgcatgctaattgcttgctctcgggccaatctcttaaagttcattgaaaacatggagaataacagtgtttattatctaaggtataatgtaagaatagaacaacacatgagaaatacccccgacaatgtttgagatggggtaagcgctgtgtaaagttctcagattataactgtgttctggcatcatagatgagaaagatacaggggtgacagggagaaaggaaggaaaccaggagaggaggactccctggaggacctggaagctagcttagagcagatgttactggtatcatctctctcagcgtcatatactaactagttttaggaatgaacttgatgttggctttggttgaaattctgcccaaatacttaccaggactctggcctcttcatctatgttacaggatacagtagctagcatctgccgtacagtgtggtgatgacatgtggtaggtgggcacttggcccggtgtttggttgaagatgggtggtagacaagcatcgccatctgttatggcagtatgaaaccttgggccaaagtcggactcaaaaccagggcgatatagctttcctcctttcctttctctgatgctctggctgccatcaatgatgtttttgttcattttattgttcatattaatgttttttttattagattggtatttaaaaataacggtcatcaatgatgttttaatgtttaatctccagctagcaactggagacgggtccaccaaccttctgttcagtaatgtgaacaaaataagttgctgttctaaaccctgggagagacatgtgatgaagatggctgtttctgttttgttttttactatttcttctatgtctcaagtcatctacaaataagaggtgtgaaggagatgtgtgaaatgcaagtgttgaaatgctgagtggtaaaagctggggagatggctcagcagttaagaacactggctgcttttccatagggcctttgattcctgacacccgtatgacagctcacaaccatctgtaactccagtccaaagggattagatgccctcttctagcctctgaggacacttcacagacaacatgaaggcaaaacacacacacacacacacacacaacacacacacacacacgcacacgcacacgcacacgcacacgcacacgtcttaaaaaaacaaaacaaaacaaaaattctgagtgttggcatactgcagtgatctcagcacttaggaggtgtgcacacccacactactttatttttagtgaactttatggttcctcaagtctttcgttgacaggataaaaataaacaagattacagtgttttaatgaagggtatccagagtaaactctaggatcaccccacctaacttggtttgcatctttttattgaacactgagtttatttctccctctctactttctgttaccaccttcctgctctctgctcccgtgggtttgaattcttagaaacacagcacttttcctatgtgtggcttttgtaatgtcttccaggcctactcatgtgtcaaacattgcacgatctcctcttgtaaagctgactatattccattggacagataagtcacagtttctcttttgttgttgttgttcatctgttcatgggccttatgttagtgtattatgattatggtgaataagggggaaagatgttgggcgtggtcaggcaggcctgtagccagcccctatgcaggtgtggctacaggttcccctaaagcccctggcaatgatttcttagatgtcacaatgaagggtaagcacaggccaataaaagcagaaatgaagaaatagggaactgttaccaaactgtaaccttggtgtaacattcttgggatcattagcaggattataaatcaacagcttagaaaatggagtccttgcagactctaggtgggactggaatccagcttactcatccttagaaacagaagttttgcaaagggttaaaaatagagtcaccgtgttgttgggtgatgtgtccctgtataagtccacaagaattgagactaatactcagagtgtctgtactccagcaacagggtgtaaatatgtcttcaactgtgtctagatgacccatccctttgggacagtttttagcttcctgtggccctaccaagccttgctacagttgcttgagtttcagtcagggggctttgagtgaaaaatataaagaggctgttatttcagcaaaattgttcctaatgtatttccccagtgggttttatatgatgtgggatttccctactaatattatcctcatgttaaaaaattaaatgaaaatttcatctatgagaggtagtccagtacagttcagttgccaataaagcaggttctcatcaactgttcccctttctctttcagtcaaaataaatcccaggagttttctctccaaatagtcctctgtcctgtgcactttgctgttaagagtgtcctgccaccacttccctttaggcaaaggaacaggctccagacccaaacaccatgtgctcgagtcccctccctgctgtctgatcttcttcagatgcacaggacaagctgaccctctcctggccccacccttctcttattgtccccctgtaggggaccccctaggtctatgatctcaggcctgtgatggggaatgcagccttggtgtttagccacggggcactgggacgtaccacccacagtcactgttgattgataatcattatgtactgtggttgagagcaaagacagtgggattttaatgggctgagtcccccaacttaaattcatcgtacagttgtactctgtttggagttggagtttgggagggaaatgctaatgaatgaagtcattaagatggggccctggcccaaggtctgttgccaatacaggaagaggacatgagaacttattcactgggcacactgacaaagagaggccatgggaggacacagctaaagagtagatgtccacaggccaggagcagggcctgcccaacagtgaactgaccagattagatgctaatcaacagaattgagagaaagaaatttcttgtttaagccacttaagctgtgatgtttcattatgtctggctgaacagaatatcacttgctttgttgttgttttggggtgtgtgtgtgtgtgtgtgtgtaagacagagtttcttcctatagctctggttgtcctgtaacttgctttgtaggccattctggccttgaactcacagagatccacctgcctctgcctctgcctcctgagcgctgtgattaaaggcgtgcaccaccactgcctggcttatcatttgcttaagcaaggtttttgatgcttccaaaatcttcatttcgttaattatagaataattattcctacgataatttaagttagtgtagacttgatatggcaatattaatttcaataaatcttgtcaatagggatgtcagcctacattcatctctctggtaatgattcatttttgtactcaatctcaaattactggaagaaagaaaacaaaaagaagggttagctgaatgaaggaaggaaaaacacaaacaaacaaaaacggagtggcctgtaggtgcaagttttctctgatggaatccgtcacagattgtgccacctccccctcctggccacacccaccctctactccctctctccttcccaccctccttcctctctgcagttcctcagaaggcctccctacctgcagtccatttgcacaaagtacgctttaggatccttgtagaacactcaatggtgggcatcatttctcttcttaaagccctgccctgattcccccactgctttgcaaatgaagcccagagttttctgtctgatcaccaggctattggtctcctcattctcagtctggtctctctgtgctcaggcacctcttactctcttttggctccctcccccaccgttttctgctctcatctccctgcatcttctaggttgcttgttgcccgatgagaggcaacttacgggtgggaggatttatttggggagataaaaaccatcatgcccaggaaaccatggcagcaggagctagggttgtnnnnnnnnnnnnnnnnnnnnnnnnnnnnnnnnnnnnnnnnnnnnnnnnnnnnnnnnnnnnnnnnnnnnnnnnnnnnnnnnnnnnnnnnnnnnnnnnnnnnnnnnnnnnnnnnnnnnnnnnnnnnnnnnnnnnnnnnnnnnnnnnnnnnnnnnnnnnnnnnnnnnnnnnnnnnnnnnnnnnnnnnnnnnnnnnnnnnnnnnnnnnnnnnnnnnnnnnnnnnnnnnnnnnnnnnnnnnnnnnnnnnnnnnnnnnnnnnnnnnnnnnnnnnnnnnnnnnnnnnnnnnnnnnnnnnnnnnnnnnnnnnnnnnnnnnnnnnnnnnnnnnnnnnnnnnnnnnnnnnnnnnnnnnnnnnnnnnnnnnnnnnnnnnnnnnnnnnnnnnnnnnnnnnnnnnnnnnnnnnnnnnnnnnnnnnnnnnnnnnnnnnnnnnnnnnnnnnnnnnnnnnnnnnnnnnnnnnnnnnnnnnnnnnnnnnnnnnnnnnnnnnnnnnnnnnnnnnnnnnnnnnnnnnnnnnnnnnnnnnnnnnnnnnnnnnnnnnnnnnnnnnnnnnnnnnnnnnnnnnnnnnnnnnnnnnnnnnnnnnnnnnnnnnnnnnnnnnnnnnnnnnnnnnnnnnnnnnnnnnnnnnnnnnnnnnnnnnnnnnnnnnnnnnnnnnnnnnnnnnnnnnnnnnnnnnnnnnnnnnnnnnnnnnnnnnnnnnnnnnnnnnnnnnnnnnnnnnnnnnnnnnnnnnnnnnnnnnnnnnnnnnnnnnnnnnnnnnnnnnnnnnnnnnnnnnnnnnnnnnnnnnnnnnnnnnnnnnnnnnnnnnnnnnnnnnnnnnnnnnnnnnnnnnnnnnnnnnnnnnnnnnnnnnnnnnnnnnnnnnnnnnnnnnnnnnnnnnnnnnnnnnnnnnnnnnnnnnnnnnnnnnnnnnnnnnnnnnnnnnnnnnnnnnnnnnnnnnnnnnnnnnnnnnnnnnnnnnnnnnnnnnnnnnnnnnnnnnnnnnnnnnnnnnnnnnnnnnnnnnnnnnnnnnnnnnnnnnnnnnnnnnnnnnnnnnnnnnnnnnnnnnnnnnnnnnnnnnnnnnnnnnnnnnnnnnnnnnnnnnnnnnnnnnnnnnnnnnnnnnnnnnnnnnnnnnnnnnnnnnnnnnnnnnnnnnnnnnnnnnnnnnnnnnnnnnnnnnnnnnnnnnnnnnnnnnnnnnnnnnnnnnnnnnnnnnnnnnnnnnnnnnnnnnnnnnnnnnnnnnnnnnnnnnnnnnnnnnnnnnnnnnnnnnnnnnnnnnnnnnnnnnnnnnnnnnnnnnnnnnnnnnnnnnnnnnnnnnnnnnnnnnnnnnnnnnnnnnnnnnnnnnnnnnnnnnnnnnnnnnnnnnnnnnnnnnnnnnnnnnnnnnnnnnnnnnnnnnnnnnnnnnnnnnnnnnnnnnnnnnnnnnnnnnnnnnnnnnnnnnnnnnnnnnnnnnnnnnnnnnnnnnnnnnnnnnnnnnnnnnnnnnnnnnnnnnnnnnnnnnnnnnnnnnnnnnnnnnnnnnnnnnnnnnnnnnnnnnnnnnnnnnnnnnnnnnnnnnnnnnnnnnnnnnnnnnnnnnnnnnnnnnnnnnnnnnnnnnnnnnnnnnnnnnnnnnnnnnnnnnnnnnnnnnnnnnnnnnnnnnnnnnnnnnnnnnnnnnnnnnnnnnnnnnnnnnnnnnnnnnnnnnnnnnnnnnnnnnnnnnnnnnnnnnnnnnnnnnnnnnnnnnnnnnnnnnnnnnnnnnnnnnnnnnnnnnnnnnnnnnnnnnnnnnnnnnnnnnnnnnnnnnnnnnnnnnnnnnnnnnnnnnnnnnnnnnnnnnnnnnnnnnnnnnnnnnnnnnnnnnnnnnnnnnnnnnnnnnnnnnnnnnnnnnnnnnnnnnnnnnnnnnnnnnnnnnnnnnnnnnnnnnnnnnnnnnnnnnnnnnnnnnnnnnnnnnnnnnnnnnnnnnnnnnnnnnnnnnnnnnnnnnnnnnnnnnnnnnnnnnnnnnnnnnnnnnnnnnnnnnnnnnnnnnnnnnnnnnnnnnnnnnnnnnnnnnnnnnnnnnnnnnnnnnnnnnnnnnnnnnnnnnnnnnnnnnnnnnnnnnnnnnnnnnnnnnnnnnnnnnnnnnnnnnnnnnnnnnnnnnnnnnnnnnnnnnnnnnnnnnnnnagaagaaaaccccaggaccattcatcattgtgacaattgtttctccctggtgattggatagactgcctgtacttcagtagtactgtttcttggtgggaattgctgagagggatacatctcctacccaatgggttttctccttgaaccctggtgtatctcacgtcctccatatttaccacagcaaggaagagagtgactggggaaatgaccaggtagaccctccctcacaggaagtggtatttatctgttgcgttggtggggagcagagggcagaggggaagcagagcctggctgtgaaccaaaaagcacccagtgacctacttcctccagtgaggactcctgaagagtctacaagttgcaacagcacctccagctgaggacgagtgttcaaatgcacgggtctgtggggccttttcatgcacacaccacctcagaaacctgcccttaaatcttcagcaaatgctgagcatgtgttagctttgtgttgccgtgaggggcagctttcctgttcacacttaatctcggcactaaagcctgggattttcatatgagagagtcaggattttcatatgagagagtgggtgtatctgctgtctgtctccagagctttctaagtatcttgaatttgcaattctcctgcttcagcctcccgaatagctgggattgtaggcctgcatctcagccagccttatgaacacttctcagtattttattttaccttgaaatttcaaatgtacattcattcaccaaccttctagtaacaaaataaataaataaataaataaataaataaataaataaaagtccttaagagcctgcggattagactttgcaatgtcagtgcccactacaggtttgttattttagagtagaataaaagttaaaggtgcttgcagtcatttgcatagacaggttgaatttcgtcttattttcctccaatcctttacggttgcttcacatctaaatcagtggcaatttttttggacaaccctctcgttttactatttctaatttacctactttccttagaaatacaacttcttattcccacacttatattttacctgtttgtaaagtatttcaaagcaatgaatactgcaagtgaaaaaaaaaaaaaaacttcattagacacagctgagttttagtagtcctggtttagctcatgggagcaggaaggctgagtctttgagttgcaaacatcccaatatatttacctggtttagaggctgtctggaaatctgttggcacaattaacaggctctttgaagagcagtcttactacaggtgatagttataagatctgcttctcgataactgtttaaacccccacatagttaaattcagattgttaaactgtgttggttaagtaccagcacctggaacagagactaaagcttgcctttgtccaggtggatcagaaagatttctgtctgagcaaggtgatgcaggcttgaaatcccagcatgtgagaggcaatggcgtgaatgccactgggaactcaaagccagccgggtctgcatagtgagttctaggcctgccagagctatatgatgaagaattgcctgaattctcattcccatccccaaagaaagaaagaaaatggggtgagggaaggaggggggaggggggagtaaggaatccaggaagaaaggaagggggaggaaggagtggagggagggagataaacctctctcctctcagggtaagttccatggaaccttcattcacttgcatgtgtcaccccctgacacatattctatgtgcaggatgctatgctgataaaggggcggtgaccccctctgtcattcagccaactctctttacaaggatggctccatcttaaactcacagttaaagtttggccaccacaaccccaacagtacagtcaggtgattcgatgcccactctgaagtcactcaggtggacatttcagccaggtttatagcctcaagcatgaattccctcctgtgcaagaaaccttaaggtcaatccaaaatgactgattgcatccaaaacctacatgccactattgcaccagagagcacatcccgcctggcaggtcagtcagtattgttgtatgcagagttcatcacagggtaagtccactgatggggtttttcttccctaacagcctatacagcatttctgccactttgaaagctagcctgcagggaagaagttttcagatgggttccaacttgatctctctgtgtcctacaaccaaagtatgtcgtatcttcagcaataggtgaagggaccagctccccatttcggcagccatgacagtaacatgtgcttttctgaccttgtcttagtcactagaggttaggtgcctgccttcgtggcaaggaaccaatcagaagttagctggtggtagtatgctttacagctctgggtgtgctttacggacaagcactcagcagtgacacgcagagcatagcaacaaccctgggagggcctatgggccataacaaccagttggccaatcaacacagggcaagccctcaaagcctgaaggcacaccaatcctgagcctgtgtgtacccctagacactccccttacgctgccctacaagatctctatgcagccccttcgagctgtctttgctagccatccaccatggcgggtaggtgaaagacccgagctaacttggggttagcttgttaaataacaataaagcctcgtgcagtttgcatcaagctttcgaatctgcctggtgattggggtgacggcggtcctgggctgggaccccggaggcctgagttttccgggggtctaacataggctcttaccatctagttatggggggcaaccaatagcagtggcaatagcctattttcggggggagggttatttggggtttcctgaccaacaactcatagggagatgtcttagttacttttctatggctgtgctaggatacaatagccaaggcaacttatacaagaaacagttttggggtacttacagtttcagagagggagtccatgaccatcattcacagagcatggcagcaggcaggtgggccggaccctgaggccatagctgagagctgacaccttgatctgcaaacacgaggcagagaaaaaactaactgggaatgaatgggctcttgaaacctggaagcccaccccagtgacttacatccttcaataatgtcacaccttccaacccttcccttaccaactaggtaccaagcaatggaatacatgagcctatggggccattctcactgagacaccacaggatgtggatcccacagtggaccagtctcttttctatcggataactaaaatttctcttgtgcaaaagacgtatccagtgtaatggttgatttccatcgttgacgactggttaagaaacacccaggccattgatgagccgtgccactgagtgtacctgtgagggtgtttccaaggagggaagatctactctgcaagtagctagcaccactctgcaagcttgggtcttcaactgagtgaaaagggaaaaggggtggctggacaccagcattattaccgtttggggtagctacgagtaagcagcctcctttccccatgctttccccatgttttatcacaggtacaagaaagagaactaatacatccatccactatttgattggctgacgcatggggaagaattgaactaaaatctattgcagtttgctcagcctatagacttgtcagaagaacaaagcccattgatgtagttctttgtgtttcctcctacgcgggatgactgaaattctacagggaaatcccattagattgagataagagtctgtgggaaaatgaactaatagaggaaggagtgtcgaagaagcacagttgtcattagacactgaggaaacctgggatgtctaattaaccactgctcttgatgcctccagtctgtcagcattatctccttgtaattcctttaaaatgctgtttataagctgctttagtttggtctttaaaactcaggcgtcagtgagtgtttctagaacttcctttacagtctgtgctgagggaacatttcagatgtcttcctcatggccacgacaccatctaccttgtgcctctgggaaaaaaaattaaaatcccagtattattagccaggtttagccaggaggatatggtttctttggctgctgtggtatttttatcagtgaaattctaaagacatttccaatatcgtaagtaggaatttgaaattattttgttttttttttcctgttgatgaaccaagaggaaattatatctttaacctacatatacatacacaaacatgcacatgcatacacacacatatatcaaatacacacatgcatattatgcacatatgtacacatctgtatgtgttttttattatgtctcatattcacaaagtttaaggaactaatattactttatttgggaaaatactgaattttagtgaaattgtggccaacttatcaactcagtttcaaaatgaaagtgttactatttatcttcaggaaagttatgtattctccggctgtcttttttcctctccatgtctcactttcctttaattcgcttagctgaggcttcccaggatgtagactccagggcagaggttttcaggcaggaaacccatccagttcactctcataaacacaggaaggaaggaagcagaaagcaggatggacaggggtgtggggatgcggtgaactgcaccaggctcactgacgctgagtacttctgcagcagggctgaccgttcagagctgccatgaggggacatcagtatagatgtaccctcatcagctgggcactacaccccaggcatctggtggagaggcggcgggcctcgctagcaccatgtcctgacacctggaaatgagtgcctgcaaactgaaggcacatacacaacaacagacactgattcttcacaggagcggtaacccttgcccaaaatgtatgggatctgagtgtttagagttcacagcattcatcagagtagagttttgactttatgttaatgaggatggtgctgccaccctcttcaaatagatgccagattccattgttattcctgtagccagctaaaagtcatgtccaaatcactcatcagatagcattcagaaacaaagtctaaccatagtcaccatccctactgtcccacctgtcacctagaccttgcagcacaggctggccttgaacatggaacaattcttctgcttagccgtgaaattatagctgccttagttatggttcgtttgctataaagggacacattgaccaagggaatttttataaaagaaagcattttattgggaatttgcttaaaatttcaaagcattagtccattatcatcacagtggggagcatggtggcatgctggtcctggagctgagggctttatgtcctgatctacaggcagcagggagggagggagggagggagggaggaagagaaagactgggcctggcatgggtgtttgaaacctcaaagtccaccccatggaggatacacctcctccagcaaggccacacctcctaatcctactaagcattcaaatacttgagcttgtagaggattcttattcaaaccaccacatttcattctcataggctgttacctatatcaatcataacccaaaatgcatttggtccaacttcaaaagtccccgtagtctatgacagtcttaacattgttcagaagtccaaagtctcttctgagacctgaggcactctcttaactgtaaccctgtaagatcaaaatgaaaacacagatcacatactgccagcatacaatgacacagaatatacattaccattccaaaagggagggaagggaacatagtgagggaatactgaaccaaaacaagacaaaaaatccagcagggcaaactccatactgttttccatgtctgatgtcaaagctttcttcagatcttcaactcctttcagctttgttgactacaacacacttctctctcttaggctggttctaaacctagtctgaagctctccttggcaggtgtcccaggattctggcacccccagcatcttagggtctccaaggcaatccaggcttcatcttcacagcttcacacaatggcctgtccaggcctccattcagggacactcctgacacatgtctgcccgaagtagctgtccttagccatggcagcaaactccgcaacctctttcttgtatccatgactaaagccagaactgtgtggctaaagctgccaagttctgctgctttctgggctggaacgtgaccccctcattcaattacatctgcatcagattctgtttccctcactacttttctttaattcctttttacaagttggaagcttagctgggtagggtcctgtgccaaggtcaccactccctctattccatctagcgtcaggcctttctttaaactctgtgtgtccttgaacactaaacttgtttccaacatcacatttccatgtgctccttttctcttcaaactgtacactttgtgtttttccttgtcccttttcttattgtggatctgcataagacttaacactaataacaggacagtcaatactagactatctttaaatctcctctgtcaaagcccttaatccaaaactcttcaatttagcttggaagatttttagggctagaaaaaaaagcaccgtattctttgccaaaatatcaccagagtggtctttaggccactttaatatttttgccctctgaagcctccagagctgggcccctacattccacatggccctcctcaccactgtcttccatgcttcttctaaaatagcccagtaagccccactcaaagtgcataactggttttctcttccacactctgccagtgagcaggattataaggcatgtgacagcaatgccctagtccctggtaccaactgctgttgtggtcattgttctcttactgtgaagagacactatcaccaaggcaattcttataaaggaaagtgttaagtcgggcctcgcttacagtttcatagtattagtccattatcaccctagtggggagcatgatgggcttttgaaactgcaaagcacgtccctgtcaaggccatgcccttcatccagtagggccaagcatacatcctgacgtacttcccacatacatatcccaccttccacctatgtgtgatcaagtacatcctgtgcagttggggcaaccaaccttatttacagaagtgaaaatatgtggcttgttatcctacacgtgcaacagcccccagcattaccacaagttgtctgtccttgggcaagtggggcttacaggttagatgaattttggtttttagatctctcaagcatagtgattaaaacttaaaatataaaatccacaacatctttctttctctccctgctcttgccccttcatcaggaccagttcccaccatcactgtccctccttgtaagtcttcagtgtagaacaccttgaggaacaaggagcccccggtcgtatgtgttttacatgctccctgcagctcactgtttccacttccgctgtccatttcctactgcctggaagcaagggcaggttataggcctctgacagaggacctggcccactgtagagaagaagcctgtgtgatgacagcgacagcgtgtaacatctcaggcacagaacacttagtgagtggtaactggtgagtggtgattctcagagagctatgggcaatgagggcagaatagctcatccagtactgggatctaggtattgccagatactccacagcctacctacttccaagtgcatgccagcgacgatccccagtggtcaagactgacgtttggaatgtgcgcccttcccgcctccatgctctcctccgctaagagttgttgattaggaatgcgggcgtatcttcctgcccactgttatctctaggttaactcaacagccagtatgtgttcatgccaagaaatgccatgacaacagagacccaggagcacacaaatctgtcactcaaaaggcacacaggacttggaatgacctcctaaccttgggcatggctttaaaattggtctagcattgtgtttggtgcagaggaaatgggagaaaccttggtttctaggctgctatgctcccataggcctcccatgctgctaggcccgtgaggatcaattcctcctactgtgaagaattgacagttccccaagatggaaatggctccttagccttggtaccaagaaggcacagcacaggaagaatgggcagataggagctggtttaagtgtttgttcactgggctggtgatggggaaagaataggtgttgttttgactgatggaagcaatggaagcaattcaaaggcccctagaggccaggaagaaggtgagcggtgtgtgtgtgtgtgtgtgtgtgtgtgtgtgtgtgtgtgtgtgtgtgtatgtgtgttcacgggtgcaggtgcattctcttccccttgttttttcaagacagtctctccctgaatatagaggcaacccactgtatcaattaggcagccagtaagctttaggaacccacctgtttctgctccccaaagaccgagtttacagacatacacaaccatgtccagcctttgcatgagtattggggagtccccaactcatactagcatggcatgcttgtatgacagggactttgccaactatctccccagtccaagagtgatgtttctggagagccctagcctgacatgtgatcaccagagttctgcatctgaactcaaagtacagttgtgatgatgtcttcatgcccttatctcattcacatggaaagtttataaaagcagctaacacacacacacacacacacacacacacacacacacacacacacacacacacacacacacaccgcatcacacctagcatcatgcaactggcatctgtccccagtattttccccatggaccagtttcctgtccaccactctgccactcaatccaaagttcatcaccctgcaaacctttcctattgaaaagagcagggaattgttagtttagtagattttcccaaacccaagaagtgaaatctctggagtcaggacaatacagccattacaagtgactcacttccggagggcttcaagaaaatgtttttactctgtggagccttggccaaattcctgggtggagtccctctaccacagcactgaggtcactgaggtgaaagggtgagaggtcatgtttaatccctaatgctttcttccagagatcaggaacccagggaaaaaaaaaaaaaaaaacggagaaggaacagagcaggtcaagtgctagcaatcacttcagatgatcaaagacgctaaccagtaagatcgccagtgttacccagggccagttagtgacaggatgattgaactcatggcacagaaggaaccaagcatttgaagtatgccgaatcagcagtctatcaacgtctgaagagaagttagttctgagtatacttcagtccagggaaactgagcttcaattacagagagatatttttcctagtcatatttgcctttgtgatttttttctcaacaggaaatagaaaataaacaactttagagtagttaacctcaaataaattaatgtgtggcatgaaaatcagacacttgattataggtgtgtgtgctctgggagggagctgcaaactataaccataaatcaatgttatttgaacaataaaattactggtaaggtactgaaaggttaaaaacataaggcatccttaacttttcaattttaaaagacatgaatgaaacaaaatataagcccaaacttcagttccaaacagctaaatctgtgggccttcacagacacaggtggaaagatggcacagtgggcaagagctcttgatgacctagcatgatgacctgagttcagatcctggcacccacattagaagccaagtgtggctgcttgtgcctgtaacccagccctgtgccagtggagactggatcagtggggcttgctggctgccagcctagctgcggttttgatgaaagaccctgcctcaaagaaataagacagagactgatagagcaggacactaagcatccagacacatgcacacacatacgtgtacacacacacacacacacacacacacacacacacacacacaccttacaaacagtgactacaagcaggagctcacttcttacaggctactgagtgtaattgactccagctagttcccatacaatgtgtgcttctcaaagaggtaattgtataaactaaggacatgaccactccaaggtatggttgaagggaaggtttttattataaatatgaaggagataactatagccatctggaagtatctagagcaggaagaagtagccaatggaacatggccagcagaatgaacttggtcatgcagagagagagaaaggaagagcaagagaggaagacaaagagaacgagggcaaaggagaccaaggaagagcggggctaagccaaaatagccaggttataagggagtcagaagctagggaagggaagcccatgagttagagaggtgtagggtagggagtaagaagagccagggtgtgccagtcccaccagtcaagaagaatacactaccataatttaaagccaagtttgaagcaagcttttattaaatactggtcagatccatggactttctgaccaggtctctatctctgggtttccagaaaatggccccaagccatggttcgcaggggcttaaaaaggtaaaacccataattggccatatttcccatggggtccactcaggggtaagagtccaccctgatgaatttcctgcctgtgaactcgcccccacatgtgatccagcacattgggtgcagatgggtcaaacaaacttgtttaggggagtgaagcgtggtttgtttgttacctccataaacaacagctcccagcatttcaggaagtacatgtccatgagaagaggcttgcaggtcagaggttttcttgtttcatggatctcttaggcacagtaattaaaacttaaaatgtaactttggttctcacagatgccagtgtggactcatgttgttttaatctaagttattatatttaccataaagactcaggagtcagatattggggtgaaaagctactagatcagagaagtcaaggagcaaccaactctatggctaattcttgtcaactagtccctggctccacccccaatccaacattaattttattagctaagtctcagagtgtcacagtggggacaaatatcccacaacagactcagtaacagatataacagttgtgatactgggagagcttggtggctagtagtagcacagatagccatttgtgtgaagtttcttttgtacctgacagtaaatgatgattttaagacagcgggtgatacttggaagtaaataagtatctgtgaagccaacatttttacatgttgcatagatttcactctgccctctgagaactggttcatattaggtcacaatttaagtgaactgctcataagaagtaataaaaatattctaaatagaagtttcaattcctagcaattcatttatttgctgaggtgaagcttgagtgactcatgtattatttgggaaaaccaatgattgacaggaataatttgccttcttaacacctaagaggacaagtatttctgggatggtgcttgtgtgagcatgtgtgggggggtgagggagggagggagggagggagggagagagagagagagagagagagagagagagagagaaggagagagagacagagagagagagagagagagagagaaggagagagagacagagacagctgctttagttcatttttcccagcctccttttccttgatggtaaaacactacactgggaatttttaaatagggtgatgtatgagaaaaagcttcaaaatgccatttgcattagcacatactggagtgagctctgtcttggcttttgtgcattaaaggccagctctatggataagtagcaggtagagcaagacttctagcctgctaaggatgtccactccagattggtgagaaagagctgactgtgtggtggttctaccatattgaatgaaagactgaattgactcctccctcccttcatgtggataatatagtttgctgatacatatcccacctgctttttatttcttttgaattttaggaaggctgacttatacttcatcacatgctaatttttgtgtctgaactgttttaagttcttaacattttaagaactgtatcaaacgtagtggaaggaaagtgagggagatggggaaagagggtgaagagcaagtgtttcctttcatgaggagacaggagacttccaccctttcctggctggggcagtcttatcaggttctgatccagagatatttgaaaagatcccatataaacagaggctttttctgtgtcctgcccagccctgtagctgcttacaaaataatcactcagaggcttaatattaattataattgtttggctgatggctcaggcttattactaaccagctcttacacagaaattaacctattttattaatctatgtattgccatgcagctgtgaccttatgtcattttctacatgtcttgcttcctcagtggctggctagcatctcctcaaccccgtcttctttcacgcatagcttggctttcccacctaactatattctgccctgccataggccaaagtagctttattcatcaaccaataaaagcaacacatattcacagcatacagaaagacatcccacatcaatcccttcctgaggggaccccacacgggtagtaagcactgaacagggaactggtagctgtgtgacctcgacagaaagttcccatccagggcagggaagattccttggcagagggactaaaatgtgtttactcttacagatttacattttcttactcttgcagtgttggggtttatttccttacacctctgagtctaaaggttttgctttctgctatatttatttgcatgccttcagctgcaaaagcacttatgacacagacatcccattacaaggaaaagttcagggtccgttggggctgcgacatgcttggagtgccagtttagaagtccacgtttaacactttgattttccaggctgtacccacgccacgcaagtgcactgaacaacctcgggacactgacaaaggacacggcagaggcaaagctgtactaccagagggcgctgcaactccatcctcagcacaaccgtgcgcttttcaacctggggaatctcctgaagtaagtggggtggctcctgcgggctgggtggcctggagagttcccgagacccaggtttcagggtgctactgatgcctcctagcgatgaatagttttcacacctccgtcatagtcattaactctgtatttcttaggtgtctttctgggaccagtccattgattgtccccgggaactgagaaggatgacatagccaagaaaacttaggatgtgctgtgttacaaaaagagtgaggctacaaagagctttcctatgcctcgagtttcttgtgaatctttctgaagaactccttagggtacagccattccaatgctaacagtctgtagtatacttccaagaaagtggtgttgttctctgagggtaaaatgaagggcctgaacaggaatcattttcagcttgaattaagagggaaaaaaagccaggcttgtttggagttagaataattctcaggaagggatgcaaagatggctcagtggttaagagcaagtactgctcttgcagaggtcctgagttcagttcccagctcccactttgggcagttcataactgtctgtaaccccaggtccaggaatctgatgccctcttctggactccacaggcacccacacatgtgtgaacatactcacacagacacatgcacaaaaataaaaataaatcttaaaagataaaataggagcagatcaaaaggcatgagaagggtgagttctagttactgagacagctggctagctgcaggcatcacttttacttcactttagaaactttgtgaacactgtgtctttgtgtgacgttgtaaggactcaggtctgaacgtcactagagtatccatgtgtgctttgtttatggctcagatgagtgggtagaaaatcccacagatatctccttagataattggtttctatagcacgagtttcagagatcttttttttcttctttttttatttgaattacaaacaagattgaattacatgagaatcccagttcccttttccctcccttcctcccctacagaccccccaaaactaaaaccctacctatcacatatcctttcttgtaatctacacctgactcaacctttctgctccctcatgacctctgcatctttccttttcttcccttctcattctcatagctccctcccccctcttcccatgttctcactttgctcaggggatggtgaccctttccccttctccaggggacaacgttcgtctcttttaggatcctcctagtttactagtttctctatcagtatggattgtaggctggtaatcccttactctatgtctaaaatccgcatatgagtgagtacataccatgttggtctttttgtgattgggttacctggctcagaatggtttcttcgagttccatccattttcctgcgaatttcaagattccattgtttttttctgctgagtagtactccattgtgcaaatgtaccacattttctccatccattcttcagttgaggggcatctaggctgcttccagtttctggctattacaaatagtgctgctatgaacatcgttgaacagatgtctttgttgtgtgaatgtgcttcttttgggtatatgcctaagagtggaattgctggatcttggggtagactgattcccattttcctgaggaatcgccatactgatttccaaagtggctgtacaagttggcactcccaccagcagtggagaagtgttcccctttctccacaccctctccaacataaactgtcattggtgttttttattttagccattctgacaggagtaagatggtatctcagagttattttgatttgcatttccctggtggctaaggatgttgaacactttcttatgttgaggtctttggtccattttgacttaagttttgtgcaaggtgaaggcttgggtctatctgtagtcttctacatgtttgcatccagttatgccaacaccatttgttaaagatattctatccccatcaaaatcccaacacaattcttcactgaccttgaaggaataattctcaactttatatggagaaacaaaagacctaggatagccaaaacaaccctgtacaatagaggaacttctggagtcatcaccatccctgacttcaagttctattacagagctatagtccagagatcttttcaataagtatatttttcttttctaagaagccaagctaaagggctggctgcagagtgagagtcctggtcaggaatgctgtctggagttctgtgctcagattgtatagcatgactctgtggcaggggttctgtttctctgttccctttcctccttctggggaccaagctgacaatgttaaccccagtccttcttccatccatcagtctgtctccactgacttcttcaatggtcacatttgagttaatactgtaggaaagaatgctttagaacacagtgtgatgactgcttttcagtgggagaggctactgacttactggcataagactttctcctgcttgggaaaatcagttatcactcagatccatagtacagctttaggtctgcataagactggcaccatttctggggactggtgggagatgtccttctgtaaatatgtttctcttactggttgatgaataaaacattgtttggccaatagatgcaggaagataggcgggacgaggagatgaggagaaggctgtggagagaggagagagaggcagaggagactccatgtagagactgggaagataggatgtgctaggtgttctctggtaagataagaccatatagaaacacatagattagtagttacggattaataattaagagagagctagccagtaagaagccctagccattggccaacagttttataattaatatagcatccatgtgtttatttggggccaatctgcttcgggaccaggcaggacagaaaccgccatcttcagggggtctttcatttttcatggtgctcttccagtcagacttcagtgtaagtggggaagaggagcaggggtcctcagacatgccatgcatagggagaagcagtcatgtctcaatgtgagtcccagaatccagtgggtgaaatcatgctaatagctagtatttttgtagtactttctaactgacaagtcatatacacagtattcttgtaacatatgtttgcatgtgtatagctgcatagaagaattctgaaaacaacctgtactgggaggtgttactatcttcacctcctttcacaggtaagctcctccaagaactatgtgaccctgacctaggcttgtgactgacccagatcaaactctctgccctttgactgcttgtcttgtttactttacattcctgtttgtcctaaatagttccccagccccaaggttacataacattaagttgtataagagcttgccttggccttgtgtagacttcctaatagtctttctgaaggaaacagtacagtgtattttcattaagcagaggttgcttgctaagtgacagaggaaagcgatgcagaaagctgcagagctattctgcattcagatggatacgagctaacctctgcttcccctaatgggcttcagggccagtagtgatgagtagaaatcaagaaaaggttaagaatgttgtaaatgtggggtgaagtgtgagatctactgtttcttcatccatgccctagttgtctctccagtctgcttctgagttgttggagtttgctttataaaaccatgcctccttctgtagagtagaatgtaatgctcactctttgtgtatgagaagctcaggtctgaccattcctaagaggcagccactcactgttcttatttaataaacgaggatactagagtttggactagagaaacctcagtccctttaactcagcagacctaaccactgcctcctagtgacccacatggaaagtgccagccagctgtgaaatggccaccagctgcctggtaggagctgtgtatgcaatgtcaggaagtccttttaaaacatataaaaatgaactttaatcatatctttaattaaacactaatctgtctaaattattattttagctcacgattaatattttacaatggtttaaatttttagcataaaacatcaaagatatgaatgagacgacttgcattcttacactaaatctcttaaatctaatgcatatttgatgctcacagccagtctcagagcagctatacttcacatgtgtgaggatggttcctctcttggccagcactgtcttttactaataaccttgactttgaaggaatcgcaggtcctttgtccaggcccaaaagtctaaaaatgagatgtttctctgtcagagagtaccagccagctcattgtaagttgcttggattcttggaattatatggttcctgcttcaacagtagactctaagggtaacccacatgtgtgtggtctcattcaagccatcccttgaggctttgaagcttctctgctgtgagtctctacggcacattgtggtggaagactgagaaggagcagcccccaattcatattgatcaataacggcttctcttgggacttaaaatatcaaaaaaggagaaaggaaaaagaaaagaaaaaaagagaaaagaaaagagcaagaaaagcttgtgatttttatgggcaaagattacagaagtccccagtgtgtcacaaggtacaacagagtgtttaaaatcagggtatggggaaaccatttatgtgaatgcatgattgaaatagatggtggcttttgttactaaaatgaaaaatgaagaaatgtcagggttcatgtcatacccctgcccattgctgcagcagccttccactcctgttagagagtgtgggtgtccaaagtatttctatgaatctggtgaggacggtgacagaacataccagaatgtccagcaacgaaactgtgtgataaactgaatagccatgtgtgttttattttctttagttggctccttcagaatgaagaccttctaaggattgtgaagacatggaaactaattattataataaatttaaatgtttggtgcatacttcctcatagcgtcttcattggccacacagtgtttttatgaaaggacatcggtatgtgcacaaagctggtagatctctgcttctcaactttgttctcttttgagacagagtttcactctgtagcttaggttgaccttgaactcatggcagtcctcctgtttcagcccccacccagtaatgaacttcagcgtctatgtcagctccctgggttctgttcatccttctgtccaagggcgcccacctcctgcactggggtccatccttctccccaaggctgtccatctgcactgtgcttgggtactttccaacatggctgtgccaccaacttcctacatgtgcagacattttcattctataggtcctggattctgacctttgacttttggcctctgacctctgatggctcacttttcctttctcccattttcttcactcctgctgaccttgatgaattgtcatcttgtagcccttctttgtgtctctttcctgtagttttcttttcagacctcctgtgatgagcacagctctccacttataccaccttctgctgctctgttcataactttgttagatttcctctattaaatatgtcgtatgacattattttactcctttatccaatacctagtcttcttcatcctctctatggacttgggagttaatgccctttgcattatcacagagtgcaaacgtctcagcattcagggtttcctgcccctcatcactcatatccattcttctgtcttcaggaaacccagacccagctaatactgaccattgtcagtgtgtgagagtttccttccagactgcattgactgaggccctcagcgaggcttaaggataaaactgttctggtgcactgaaaatgtcccatttcccctcttctcttttcagtgtctgcccaacttcccagacttacctgggaagtgagagcatgtgctgtgaccccacaactgaggacatagcagaccattacagtacttctgtgagcattgccccacaattgtgctcacacacaccacaattcctgccggtcttaagtccacagtggagttctctgctgtgataacacagtgcaggccagagcagagttccacaggaagcattcttaaaggagcctggggctttgtttacattctctggaaggattgtcatccactttccctgagcagatatctccaggaaaagttaatgctccaggccagactgccttgtcaagtacaagagtttcaagaatctcaggccgctactctcctgggtgcctttgtagttgagctgtcctaagacccagagggagatggcttaaggcaggaaccgtccagttaaaggctaatgataacatgccagtcactgggaacttcatttacagacactgtcatacgttagacaaccaacacttcatcctgtatcttgagtcagtccagcaggttttcactttgtctcaaaggtcaacttggtatttgggttgttggaggatctcaaaagctttcaagttcaaagatgctctttgtacaccaggcagagaagcaagaagaacagaagaacatttgttctgtgttctcatacctgtttccggcctgcaggctccaacccaggcagcacttggggagtgaatcttggcttaagaaggccgccccttctcagggacttgtcaattctgccgcttccttcctcctctgctttccacagaatgcagtctccccagccagtctgctggatagcacatgggctttctgctctcacccttcctgttaccttcttctgattgacaggaatgatggttgattcacacctttcttatgactctgtccactgggagcagtggggtaccaatccataatctcctgctcagacagagaactgactaggacaggatcgtgtaaagagaggttctttgtcctgtcttgtggcccttaagcctcaaataagcaatcagatgctatattagttataaactgttgtctggtggcttcttattggctagctctgtcttaattattaacccatttttatcagtctatgtattgccacgaggctgtggcttacccagtaatccctggcatgttgttactcctccagcagcatctcgactctttctgtctggcccactctccctgcctttcccagaattgtcctgatctcctagtcctgcctatcttccttcccaattgaccgaatagtgttttattcatcagccaataagagaagcatatatacagaaggactatcgggggagcaaggaaaattccattagggaatttctggaggtccaaacctccggagctcctgtctgcattgaatctctacagaactaagcatttgaataggcctgcaccaggtcggagggcaaggtatgtaagtaaccagtggggacggagagaatcaggaggtagcaggcagagggtttgactggaggagagagaaatggactcatggccagggaagcatggttaggaaacaggaagatgccaaataaagaagagagtccagttttgcagcatggaactgagaactctctaaagatgacaagatgcctgtgtttggtctttagcgccattgggttgctaggagtttccaagtccaccctcccccactcaggccgaactgaacctcacggctgccctggcttggggctgagacatgctgggccacgacaaaggacatcccccatcaggatcacatgccaatcaacttcagagagggccttgacatccttcttccagtgacatcaaccatgtcctttcttagaataggcagctattaccatgtgctgatctctgattatcacgtcacttcaggaaaacagtttcagctggctgtggcttcacctgttcatgtataaagtagaaatagttctagaaactgaacatctcttaagtactaaatgtaatgtattaagaacttaatacaggacccagcacacaataaggatgaactagttatttaggtgttactgtaacctaaaaacatagtatctcccatccaatctgaagctcagcttctgggtgtaacgttaataagggatgagaagtgggcagccattctctacccatgccactagttaaacatcctatgatgacagtcagctgctgggagacccggatctctctacttaagtagaagaaagagcctctcattgtcctgggacttgccaaataggctaggctagccagccagtgagctccaaagtccacctgtctccatctcccaagtgctgggaatacgtttgttattagtcacacgtacctgctagggatcaaactcaggccctcttgttcatacggcaggccctttaccaatggagccatctccccagcccagcagtgtgatttgaattgtccgcttttccagtcttcactgtcatgtaaatcaagcagaacaataagtgtgaactacagtcacacttattttttacacactgctttggacacaatgcactcagaaatcccgtgctaaagcgatgcagagcaaccaggagtccttcccatcccgtgtgggaagcagagccccaggaagcccacaattacaaagcccatctcctgagatgtctgtccttagcttgaatttcacacggcaagctggtaatgtctcctgccgtaaaagcagaaataaaaatcttctttgtttacgggaaacatgattttcgacccagttacagcaaagagcagcactgcaataacagaagccccgtggcgcagaggacctgctattcctgccttcacccttcactcctttcttctcattgttcctctccctctgtcgcaaacctatccagtctagtttatattagccagctgccactatgggaagggctgccctggactgtggttctgtatccggtgtcacgccattgaagaaaactgactgtcctctcccagcagcattcaaattccaatagctcctcagctaggggcaagaatttgtgcccactcctcccaccaccacaaaccccgtgctgagatttttgtctgacttgagcttgtgcgtgctgacacagtcatcgtgagttcacatatacatctatcctgttgtgtttgggaaacactcctcccttaaactcatctaccaccctctgtttcttacaatctgtccaccccttcattaacatagagacctgagcaccaaggggaagagggtgatggaaacatcccatttacggtggagtactctgaagtttcttattctctgtacattgaccagttatgagtctctgtgttaaaaaccattgtgtagtttcaaagaaaatggcccccaaagggagtggcactatttaggaagcatggccttgttggaataggtgtaaccctgttggaggaagtgtgtcactatagaggtggagtttgaggtcttctttgctcaagctatacccagtaagtcagaccactcccttttgcccctggggcaagatgtaggaatctcaactctttctacagcaccatgtctgcctgcacaccaccaggcttcccgccatgatgataatgaactaaacctctgaactgtaagccacccaattaaatgcttttcctttataagagttgccatgctcatggtgtctcttcacagcaatagaaatcctaactaagacagccacctactgatggccactgctgcttgcaagtcaccagtcctgtgtctgctactgacacttccaaagttcatcccatgtatcaattctttcttaaagcaatcaactacttctgttgagatgactgtgggactattggcagaaatccagaggttttgtacagtagcaaacttaacctatctctaattactggaagaaaatgtggcatatcctcaatgcattcgctaagtacctatcattgagatggcccaagaaagtgagcctccgagaatgtttttacttgacgccacagaggaaaacacaaccacagggaagttcccaagaaatcacaaacactgagctgcaaaattttcacattctgagcaaaatctaatttctactcgatgtctttcttatgaaatccattctgagatattactggtttcaggaacccattctgatgaacttttttggaaattcctggggcaggagtcatttaagagagatgagtcctgctacagagttgtaaaaggtttgtatttgtgcttgattcttacatggataatatggtgctatgtacctgtgattcatggttgagggcactctagtagagctcctgtagagaacgctacctctacagtggcaatgtctctttgtcattccttctactccatccatcactggggatggcttcgaagtcttactatatgcagatcgtgagattatcttagactgagtgttcagttgctggaaagagacaccatgaacttagcaactcttaaaaaaaaaggaaaatatttaacgggggctgacttacagtgcacagggttctgttgctgagttgttttcttgtcccaccaggtcccactgccacttcagccccaaataagcacatacagatggtatattagttataaaactgttggccgatgactggggcttcttactggctaactctgtcttaattgttaacccacttctattaatctgtgtatttccatgaggtgttgacttaccagagaatgtctggaccttctacttctttgtcgactacatggggactgtctttggcaggctctccccacctatctttcccagaattctcctcatctcctagtcctgcctgtcttcctacctcattggccagacagtgtttatacagaaggacatcccccatcaggctttatccattatcgtccatggtgggaagcatggaggcatgcagacagataggatgcaggagaggtaactgagaaggctacatatggaccagaagacagcatggggaaaaagaggatactgagcctggcttgagcacttgaaacctcagagcccaccctcagttacacactccctcccacaaggtcacacctcctaaaggtgccacgccctggtgaccaagcgttcaaattgatgagcctcggggtccattcttattcaaatcaccacaaagatccaaagcccactctcaggggagtttacaatttagcaaaggtcacagagcacacactctgggtgttaggatccccgtgaggtgggtgtttttcctcaagggatttactgatacactgtttcccagagttccctgggagaagccctgatggctatttcactgtgtcactcagatggacattaacagagtcctcaaggacttgcattaacaagctgtgttaagtggtatttaatctctctaggttcatctctgaaaggtccaagtttccattctagctgacatgagttattacaaatgaaagccactaacccattactacaaaattattgtaggttttccccccctttttgctgattttgaaggattcccagttaaatagtgtcctgtagcaactaattttctgccttaattctgtaagtccatatctccccttggattcaagcagcatttctaaatgtacttggtgaagactctttggaattctaactgtaaaatctcagtggttaaataacnnnnnnnnnnnnnnnnnnnnnnnnnnnnnnnnnnnnnnnnnnnnnnnnnnnnnnnnnnnnnnnnnnnnnnnnnnnnnnnnnnnnnnnnnnnnnnnnnnnnnnnnnnnnnnnnnnnnnnnnnnnnnnnnnnnnnnnnnnnnnnnnnnnnnnnnnnnnnnnnnnnnnnnnnnnnnnnnnnnnnnnnnnnnnnnnnnnnnnnnnnnnnnnnnnnnnnnnnnnnnnnnnnnnnnnnnnnnnnnnnnnnnnnnnnnnnnnnnnnnnnnnnnnnnnnnnnnnnnnnnnnnnnnnnnnnnnnnnnnnnnnnnnnnnnnnnnnnnnnnnnnnnnnnnnnnnnnnnnnnnnnnnnnnnnnnnnnnnnnnnnnnnnnnnnnnnnnnnnnnnnnnnnnnnnnnnnnnnnnnnnnnnnnnnnnnnnnnnnnnnnnnnnnnnnnnnnnnnnnnnnnnnnnnnnnnnnnnnnnnnnnnnnnnnnnnnnnnnnnnnnnnnnnnnnnnnnnnnnnnnnnnnnnnnnnnnnnnnnnnnnnnnnnnnnnnnnnnnnnnnnnnnnnnnnnnnnnnnnnnnnnnnnnnnnnnnnnnnnnnnnnnnnnnnnnnnnnnnnnnnnnnnnnnnnnnnnnnnnnnnnnnnnnnnnnnnnnnnnnnnnnnnnnnnnnnnnnnnnnnnnnnnnnnnnnnnnnnnnnnnnnnnnnnnnnnnnnnnnnnnnnnnnnnnnnnnnnnnnnnnnnnnnnnnnnnnnnnnnnnnnnnnnnnnnnnnnnnnnnnnnnnnnnnnnnnnnnnnnnnnnnnnnnnnnnnnnnnnnnnnnnnnnnnnnnnnnnnnnnnnnnnnnnnnnnnnnnnnnnnnnnnnnnnnnnnnnnnnnnnnnnnnnnnnnnnnnnnnnnnnnnnnnnnnnnnnnnnnnnnnnnnnnnnnnnnnnnnnnnnnnnnnnnnnnnnnnnnnnnnnnnnnnnnnnnnnnnnnnnnnnnnnnnnnnnnnnnnnnnnnnnnnnnnnnnnnnnnnnnnnnnnnnnnnnnnnnnnnnnnnnnnnnnnnnnnnnnnnnnnnnnnnnnnnnnnnnnnnnnnnnnnnnnnnnnnnnnnnnnnnnnnnnnnnnnnnnnnnnnnnnnnnnnnnnnnnnnnnnnnnnnnnnnnnnnnnnnnnnnnnnnnnnnnnnnnnnnnnnnnnnnnnnnnnnnnnnnnnnnnnnnnnnnnnnnnnnnnnnnnnnnnnnnnnnnnnnnnnnnnnnnnnnnnnnnnnnnnnnnnnnnnnnnnnnnnnnnnnnnnnnnnnnnnnnnnnnnnnnnnnnnnnnnnnnnnnnnnnnnnnnnnnnnnnnnnnnnnnnnnnnnnnnnnnnnnnnnnnnnnnnnnnnnnnnnnnnnnnnnnnnnnnnnnnnnnnnnnnnnnnnnnnnnnnnnnnnnnnnnnnnnnnnnnnnnnnnnnnnnnnnnnnnnnnnnnnnnnnnnnnnnnnnnnnnnnnnnnnnnnnnnnnnnnnnnnnnnnnnnnnnnnnnnnnnnnnnnnnnnnnnnnnnnnnnnnnnnnnnnnnnnnnnnnnnnnnnnnnnnnnnnnnnnnnnnnnnnnnnnnnnnnnnnnnnnnnnnnnnnnnnnnnnnnnnnnnnnnnnnnnnnnnnnnnnnnnnnnnnnnnnnnnnnnnnnnnnnnnnnnnnnnnnnnnnnnnnnnnnnnnnnnnnnnnnnnnnnnnnnnnnnnnnnnnnnnnnnnnnnnnnnnnnnnnnnnnnnnnnnnnnnnnnnnnnnnnnnnnnnnnnnnnnnnnnnnnnnnnnnnnnnnnnnnnnnnnnnnnnnnnnnnnnnnnnnnnnnnnnnnnnnnnnnnnnnnnnnnnnnnnnnnnnnnnnnnnnnnnnnnnnnnnnnnnnnnnnnnnnnnnnnnnnnnnnnnnnnnnnnnnnnnnnnnnnnnnnnnnnnnnnnnnnnnnnnnnnnnnnnnnnnnnnnnnnnnnnnnnnnnnnnnnnnnnnnnnnnnnnnnnnnnnnnnnnnnnnnnnnnnnnnnnnnnnnnnnnnnnnnnnnnnnnnnnnnnnnnnnnnnnnnnnnnnnnnnnnnnnnnnnnnnnnnnnnnnnnnnnnnnnnnnnnnnnnnnnnnnnnnnnnnnnnnnnnnnnnnnnnnnnnnnnnnnnnnnnnnnnnnnnnnnnnnnnnnnnnnnnnnnnnnnnnnnnnnnnnnnnnnnnnnnnnnnnnnnnnnnnnnnnnnnnnnnnnnnnnnnnnnnnnnnnnnnnnnnnnnnnnnnnnnnnnnnnnnnnnnnnnnnnnnnnnnnnnnnnnnnnnnnnnnnnnnnnnnnnnnnnnnnnnnnnnnnnnnnnnnnnnnnnnnnnnnnnnnnnnnnnnnnnnnnnnnnnnnnnnnnnnnnnnnnnnnnnnnnnnnnnnnnnnnnnnnnnnnnnnnnnnnnnnnnnnnnnnnnnnnnnnnnnnnnnnnnnnnnnnnnnnnnnnnnnnnnnnnnnnnnnnnnnnnnnnnnnnnnnnnnnnnnnnnnnnnnnnnnnnnnnnnnnnnnnnnnnnnnnnnnnnnnnnnnnnnnnnnnnnnnnnnnnnnnnnnnnnnnnnnnnnnnnnnnnnnnnnnnnnnnnnnnnnnnnnnnnnnnnnnnnnnnnnnnnnnnnnnnnnnnnnnnnnnnnnnnnnnnnnnnnnnnnnnnnnnnnnnnnnnnnnnnnnnnnnnnnnnnnnnnnnnnnnnnnnnnnnnnnnnnnnnnnnnnnnnnnnnnnnnnnnnnnnnnnnnnnnnnnnnnnnnnnnnnnnnnnnnnnnnnnnnnnnnnnnnnnnnnnnnnnnnnnnnnnnnnnnnnnnnnnnnnnnnnnnnnnnnnnnnnnnnnnnnnnnnnnnnnnnnnnnnnnnnnnnnnnnnnnnnnnnnnnnnnnnnnnnnnnnnnnnnnnnnnnnnnnnnnnnnnnnnnnnnnnnnnnnnnnnnnnnnnnnnnnnnnnnnnnnnnnnnnnnnnnnnnnnnnnnnnnnnnnnnnnnnnnnnnnnnnnnnnnnnnnnnnnnnnnnnnnnnnnnnnnnnnnnnnnnnnnnnnnnnnnnnnnnnnnnnnnnnnnnnnnnnnnnnnnnnnnnnnnnnnnnnnnnnnnnnnnnnnnnnnnnnnnnnnnnnnnnnnnnnnnnnnnnnnnnnnnnnnnnnnnnnnnnnnnnnnnnnnnnnnnnnnnnnnnnnnnnnnnnnnnnnnnnnnnnnnnnnnnnnnnnnnnnnnnnnnnnnnnnnnnnnnnnnnnnnnnnnnnnnnnnnnnnnnnnnnnnnnnnnnnnnnnnnnnnnnnnnnnnnnnnnnnnnnnnnnnnnnnnnnnnnnnnnnnnnnnnnnnnnnnnnnnnnnnnnnnnnnnnnnnnnnnnnnnnnnnnnnnnnnnnnnnnnnnnnnnnnnnnnnnnnnnnnnnnnnnnnnnnnnnnnnnnnnnnnnnnnnnnnnnnnnnnnnnnnnnnnnnnnnnnnnnnnnnnnnnnnnnnnnnnnnnnnnnnnnnnnnnnnnnnnnnnnnnnnnnnnnnnnnnnnnnnnnnnnnnnnnnnnnnnnnnnnnnnnnnnnnnnnnnnnnnnnnnnnnnnnnnnnnnnnnnnnnnnnnnnnnnnnnnnnnnnnnnnnnnnnnnnnnnnnnnnnnnnnnnnnnnnnnnnnnnnnnnnnnnnnnnnnnnnnnnnnnnnnnnnnnnnnnnnnnnnnnnnnnnnnnnnnnnnnnnnnnnnnnnnnnnnnnnnnnnnnnnnnnnnnnnnnnnnnnnnnnnnnnnnnnnnnnnnnnnnnnnnnnnnnnnnnnnnnnnnnnnnnnnnnnnnnnnnnnnnnnnnnnnnnnnnnnnnnnnnnnnnnnnnnnnnnnnnnnnnnnnnnnnnnnnnnnnnnnnnnnnnnnnnnnnnnnnnnnnnnnnnnnnnnnnnnnnnnnnnnnnnnnnnnnnnnnnnnnnnnnnnnnnnnnnnnnnnnnnnnnnnnnnnnnnnnnnnnnnnnnnnnnnnnnnnnnnnnnnnnnnnnnnnnnnnnnnnnnnnnnnnnnnnnnnnnnnnnnnnnnnnnnnnnnnnnnnnnnnnnnnnnnnnnnnnnnnnnnnnnnnnnnnnnnnnnnnnnnnnnnnnnnnnnnnnnnnnnnnnnnnnnnnnnnnnnnnnnnnnnnnnnnnnnnnnnnnnnnnnnnnnnnnnnnnnnnnnnnnnnnnnnnnnnnnnnnnnnnnnnnnnnnnnnnnnnnnnnnnnnnnnnnnnnnnnnnnnnnnnnnnnnnnnnnnnnnnnnnnnnnnnnnnnnnnnnnnnnnnnnnnnnnnnnnnnnnnnnnnnnnnnnnnnnnnnnnnnnnnnnnnnnnnnnnnnnnnnnagtacatacagtgttttttctttgtgtgtgtgtgtgtgtgtgtgtgtgtgtgtgtgtgtgtgtgtgtacttggttcagaatagaatatccaatgccttcctctgttgccctctgctttgagatagggtctctcattgcacctgaagtttactcttttggccacacttggcggccagtgttctcctaggatcatctacctgtttttaactgagtcactgaggccataaacacatgtgtgtactagggactcaaactcaaacccataagcttatacccagtacgccctctccctgtcccttttctgagtgtttgatctaatgtccattgaccctgcagatagagggggttgcctgtgttctctgaacagcacagaagggctggagacagaaagtctatccggggtagatgaatttcttgaatgttgacatatagcgttttaaattaaggcaatcctccagtctttgacagcctttagcttatgttaatgaagacactggagggttttctagataaaagattgcctgcatccctcagtgtcaatacttctcacttcaccctggctccttcatcttccagaaacacataccctacctccccgcctgcgacctagcatgccaaacaccctcactgggcaggcatttccctcaaccaccacacatctccaccaacacggatccatttccttcttcttgccatgccagtttctgcccacacaatatcttgaggtcttcccttgtgacccttttggcacaacttccatcaccttgtcctgtgtttcccattctttacaaacttataccatctaacatagctttctgtattaatggtctttcacacacctccagaatgtctgagtttgtaaggacagttattgaattcattgcaatatccccacacgtgccaggctgtacgcagtcagtagattccagattggtgagtaactaaatcaacttgaaaaagaattctgggttgtgctcctgcattacagggggctggacttggggtcatactgctgtcatcgaatcatgcttcagtgtgatggcccgccctgccctgaggactagactgagaagcagtcatggggcactattcatagtgaccccaggctgtcatcctgaggctgttgccatggtccctcacatctttatgaggccctgagggtgagagatctatgtttcagtgttggaaagcctatatctatttctccgaaatttagtttttcttttcttttcaacctggtgcattgagattttttttttgttttctggaaaggtcaattctgtctccactttcgttcctcctcaactgacagccatctggaatgtattagctgcttcttcccagtgctgttcttacttctacatttgtttggtttttttccccccttaattcgtattcagctcatgttcctgccttaatttcattatgcaacaatgaggtgtgagtgaagatcgaaatacttcccagctcagatcttttctcccagctccctaggcaggtagcagacactgaactgcttgctctctgggggggaaaaacacaatgttaaacactgttacattggcatctacaagcgataaccaagtgccttgggagtatccgatggacagatttctctttacatagttctcttttctcaggaccatatttctttctaagtcccttcttgtgcttccggaacaattcagtttccagtnnnnnnnnnnnnnnnnnnnnnnnnnnnnnnnnnnnnnnnnnnnnnnnnnnnnnnnnnnnnnnnnnnnnnnnnnnnnnnnnnnnnnnnnnnnnnnnnnnnnnnnnnnnnnnnnnnnnnnnnnnnnnnnnnnnnnnnnnnnnnnnnnnnnnnnnnnnnnnnnnnnnnnnnnnnnnnnnnnnnnnnnnnnnnnnnnnnnnnnnnnnnnnnnnnnnnnnnnnnnnnnnnnnnnnnnnnnnnnnnnnnnnnnnnnnnnnnnnnnnnnnnnnnnnnnnnnnnnnnnnnnnnnnnnnnnnnnnnnnnnnnnnnnnnnnnnnnnnnnnnnnnnnnnnnnnnnnnnnnnnnnnnnnnnnnnnnnnnnnnnnnnnnnnnnnnnnnnnnnnnnnnnnnnnnnnnnnnnnnnnnnnnnnnnnnnnnnnnnnnnnnnnnnnnnnnnnnnnnnnnnnnnnnnnnnnnnnnnnnnnnnnnnnnnnnnnnnnnnnnnnnnnnnnnnnnnnnnnnnnnnnnnnnnnnnnnnnnnnnnnnnnnnnnnnnnnnnnnnnnnnnnnnnnnnnnnnnnnnnnnnnnnnnnnnnnnnnnnnnnnnnnnnnnnnnnnnnnnnnnnnnnnnnnnnnnnnnnnnnnnnnnnnnnnnnnnnnnnnnnnnnnnnnnnnnnnnnnnnnnnnnnnnnnnnnnnnnnnnnnnnnnnnnnnnnnnnnnnnnnnnnnnnnnnnnnnnnnnnnnnnnnnnnnnnnnnnnnnnnnnnnnnnnnnnnnnnnnnnnnnnnnnnnnnnnnnnnnnnnnnnnnnnnnnnnnnnnnnnnnnnnnnnnnnnnnnnnnnnnnnnnnnnnnnnnnnnnnnnnnnnnnnnnnnnnnnnnnnnnnnnnnnncccccccccaacaaattcatctgagagaggaggaggggtttattccgcccacagtttgggggtgcagtctgtcacggagagaaaggcatggcagggagtggttctgactactacttgttcacatctcagtggtccaggaagcagacaggaagtgggcccagctataagtctcaagacgtgctttcagtgcctcacttcctctacctagagatgctgttagagaaccagcagcaccagctgggaaccgcatagcctataaaggatgtttcatccaagagccatgacatcagcatacaaactcatcatttattttatttctcgggttagtatcctgagatgatgtttaaaccatgtgggccagggagatggctgcctttgcaaagtacttgctgtgaaagcaagaagtctggagatcctcagactctccataaaaagtgaagcaagcacttgggaagcacagagaggggagccccaggctgggatcaccagagaaaacctgcctcaatacagaaagtggagcacgatggaggaagacacataaagtcaacttcaagcctccacatgcatgcactcacacaaatgtgtacacacatgcactcatgagagcacaccacaaatgcatgcactctcacacacatcaagtgtgaacacacacacacacacacacacacacacacacacacacacacacacactacatcacatttaaaaaacaaaaacaaaaaacaattgatttttgatgtttcaggcttatcttcctccgaccacaggtttctctggaatatcgtggtcttagatataactctaattagtatcattgtttatacacaaataaaacattaatgtgttgagactgtgaaaattaatgggccttagtgggtatcccaaagtttcagctgtattcccttcctaaactgatgaactctgagctcagttaaagacactgtgttagggctggagagatgacttggcagttaagagcactggatgttcttccaaaaggcccgggtttgattctcagcacccacacagcagctcacaaatgcctctaactccagttctaggagatctggaacccttgcacagacaatacatacaggcaaaacacttgatgcatataaaaataaataaatcttttaaaaagaagatactacttagagtgattaggatgtttaaggaccttgacatttgtactggctcacccaggacagtcacatgactgttacagtagacagaccctataccaggcggcagtttgttgtttgcttggttttttaatgaaataaagacatttttcaggcaaaaaaatttaaaagaataacatatactttttccttagctgaagttcaagggtgtcagatgggatatttgaaatgatttcctgattatttcccgtgggaatatgggaagctgaagcaaaaagcttccaaattccacacaatgggagctcaatagttgtggcgagaaacagactatgcaggagacctccatcttttctgacagacagaaaccacatcctttgaaggagacctccgtctttctgacagacacatcttttggccttttttcccactctggaggggtgcgttgggggtatgtgaaatgctttgggatctgagaatctcactgaaaaatctgaagggtccttctaccctgagggcaattggttttaacttgaaagggacaagacagctgttaggcagaactcagggcccctcccttctccaagtctacacatcttaccttaatttctggaattcttttgagaagacacagggtttctgatacacactgtatgaaccggcggccgtcagaaatccagacctgatgttcttcaagctgccccctttcctggtagcacccctctaacagcatcctagcctttaaaacaccggaaaatatggaagcaatattcttaaagcgcagtcagtcagcatgcacacacatgtggtaccttccccttcctctgagcagagttaccatctgccacacacacacacacacacacacacacacacacacacacacagacagacacagacagacacacatagacagagagagagaggccatgcccatgcccatgctaacatccattggatgtggaccaatgtcatgctaaaagaaataataactgaataaaatctcccatgtgcaggcaagattccagaagctgtgtgaaagaattcacatttatctatatttaatttcaagtttgcagagagcacgacctatggagctatgaggcacttggcaattagaatgtccatacaagattgtctttcaaatatgcatggtttactcacacaaacattacttatgctactgtgctcatataaaaactaaacagatatttgaccaagcagggaacagttgattggacagaaaatgttggggaatcttctctggtaaggacactttggaaacttgcaggctctacccacgtctgcagggaagtccttcagctgtggcaggctgggtggatggcagtggtgaaggtccaagaatcccctgagagcatagaccagcagctgggactgacgagtgggcctgtgtgtgcctagagataatccagaagttcggtggttaccaagacgaggctgggcacagagttttacagcttcttgctggtgggtaacaacacagagactagagaagccatctttccagagaaagccagcgccatccttgaggccatttctaaagttgctgtttttattatttcactgggcagtagctttggctatcagggctcacagcttggggttggttcagtagcatatcagcgtctccttgggggtcacttggttagtgtaccaaggcatgtcctgggctaagggcttatgtgagttgcctggggctgccactgaggcctagctcctgacagagctgcctggtgacaagcttgggcattgtatttcaagtcacacacacacaaaaaatggctttttaagtcacacaaaatagcgtgttcctaagttctttgtcttggcctgaactttctgattctttaggactttctagtcctgtcttttctgccatttagatacttaccctttccaggtagctatttcagtgagaaatttgggaacagtaactttgaattatttggttatgtctttaaaaagaaaaactttatggccatggggatagtggctcaaacctgtgatccaactatttggaagaagaagcctgagagtctcagaatacagaaccccagcagggcccctccaggacagggacacagaaccccagcagggcccctccaggagaaatcactcccagtcacttttagccttggagaagccagagaaaagcatactccggcagaaaatgagatcagccctttctttctcttatcacacaagaatgggtgtgatgtgttaaaaatcagagaagtgacatgtgtcctttactccgtgtagtatctagaaacaatgccatcttgtttcattcaggttcttatatgcgtttgtgttaacacttaggtctatgtgtggcctgagtgagttcttccccctgccactcacttatgaataccaatgtgcatcattttgtgcatgtgtatggatacacacatatgacaccacatgtgtcatggcatgtttgtggaggtcagacgacaaccctagggagtctgttctctccatccatctcatggctcagcagcaggcttcttcacctgctgagacacctcacggtaccccacaaatatcattttgatgccgactttctagttaaaaataatgtgttgtagttcacatacaaaagcaccagctttggattctccttccttccttccttccttccttccttccttccttccttccttccttccttccgtccgtcctccttctcctcctcctccccctcctcctcctcctcctcctcctccttttcccttaaacagcatactttttctttctggtagctttgtaaattacaaacaatattttgagctaggtgtgatagcccaacccttgtaatcacatggaacgtgtaaatgaaaatcccacatgtacaggatgggtgggtggacacctgagataggaaagtgactttggactgcaaacaaatgaaaacatattatgagcaggtgattcctcagagtgagcagtaaagaacagtattgtgggagtggggaggatcttaggggtaggagaatagttcagtcagtccaaagcttgttgaacatgcatgaggaccagagtctggtgtgatgggtgtgatggattacgcttataatcccagcactggggaggtggaaacaggaggattcctggggcttactggccagccagcctagacctgtgagcctcaggctgcagagagaggacagaacctgagggaaaaaactggacgtttacttctgaggtgttacttgcactggagaaagtgaacgcagctctgggtaccacacagcagaagaggagagtcttagggaggcagtagcctgacttccgcctggttttccccagatctctgtcagcatgcagaggtagacactgagcttctcagacagggcttcgagttcctgagcccataggaacttgtaaccacctagctcttgtcacagaacaaagcttggcattacattagcagcaaagaagatgaaattaacatttcttagaatcctgaccactgtaaattatcactagcctcgggtttatagtctattgagaagctcaattaatatgaagaggtttataagatattttccttttgtgtatctggggatgtgactttatttaataccagagtgtgaggtggcttagaggttaagagcactgggtgctcttccagaggtcctgagttcatctcccgacaaccacatgttggctcacaaccatctataatgagatctggtgccctcttctggtgtgcaggagcacatgcagacagaacactgtatacataataaataaataaatctttacaaaaaaaataccagagtggaacatgcctttaatcccaggactcggcaggcagaggcaggtggatctctgtgagtgagttccaggacaggttccaaagcaatacaaagaaaccctgtcttcaaaaaaacaaaaacaaaaaacagagtgaaagaagactgagacctaacgtgagttcataagaggacgggctccgttcctctccttctacagtgctgtcatgaattgggtcagtcacactcaacactcacagctaggtcaacttggagtgaaccctaatgtaagaatgtattgatttaatcctttagctcatggtggctgagatcgcaaatcccagcaaagatccatcaagtggcaagtcctgtgtcttgccttcctgggagctagtcccaggaccagggactttgaagcagggcatgagaacacctgcagcaagtgtgaacagcactctgcaccaaggaggatgtcatggagacttgagcttatgtggctggggtgtggcaggcgccataagctaatggaggaagctgaggaggaaaacctctctggccaggagtagacggtgtgaatcttacatctgccagagtagaggacggagcaaaatgataggaaaatctgggagtcacacacgggggtctcctctttcctggtcccacgtcatgcctgtagaggtgcactcttgcgttctttcttcttgagtactacatttatctgagaagtccacacatgtgtacagtgtaatgtgaccacactcctccctttcgtctcttctccctgccaccatttcccctaactcacacctctgtcccattttcatatcttcctctcttttctttaaataacccattttgccccactttgttcacttagcatcatccactggcgtgtggacaatctccctaaaagaacgattctccctccccctggagctgccagctgccagctgtccctcagttaggggtggggctatcagctaacgctcagggaagtatctcctgatttttactgtagttttgtgggagctgcgttgtccacttgttcatggtacttatgttttaactccttcttgcctactagtgcgtttccgtgaggctttctcacaaccttacttttggttaagccattcctccccctcccccttccccatccccaatccccttgctcccgtccagcttgacactttaatccttgtcccctccctccttctgtgtcagacatatattgtgatatcccctcccaatggccatgtcctcccattgtcctttcactgctctggccttcctctctgaagtgactgtttctcttacgccccccttgtcacacacacacagggctcacactccgctgggagacaaagacatgcagcatcagaagatgccagaatttcctcagggaggaagaacaccaagctcgtcggtccgattcagttggatgctaaggaaaacgaggcatcaaatattgatagaatgctccccagaaatgtcctgtgatcgcttgaagctgatcgttcactgttctgtaaagaaaacaacagtggtgagagtgaggaggcagagccctcggggtgtcttcatctttggagctgcagtgtcttgagtagtttcttagcaaagtcagcaggaggtgacagagccacagactgtcagacttgtcagaccccagcttcccagggatgtcacatccctgagtctccaggtctccactttcctcaggctgccagacttgtcagtccccagctccccagagtgtcaaatccatgagtcctcagcttcccagtgctgtcacagacatacatccccggctccccagggctgtactagtgaacagtcactgtgtgactgcctgcttcatgggttagaaggaacacatttctgcatagggtccagacctgtggctgtgtcagggagctttttctaatgttagaggaacccactgtatacgtcctgtacattaaatacgtctggctgctgtggaccgtcctctaagtcaccaaactccagtagtgtcgagggagccaagcccccacagggttcacaatggtctctgcagttttcctacaaatatgaaaaagtaacttgtctttcactctcattcttttgtgaatttgcagtagttttcggtggtcatatgatatagccacaattcagaaacggctgttaaaatgatagttcccctttccacctttcatcccgtcaggtcacagtttcttcatgcttgaactaccaataacaggaaacacttaaaaacacaccgtcacaaaagcaggtgtgagaagccaggtatcttctactaggtcaaacattaaagagatgggtaaatggagccaggagacagctcagtaactagcatgtgtgtggctcttaattctgtcctcagaatgcccataaccaaaataatctagtaagtatctcaattaatatcactgtcgtatcttcttttgctttggaaggtctttttatatagacacattgtttatgttagagcttattgtcaattctctccttctatgaaagttcgggagattgaactcaggttgtcaggcttggcagctgacaccttaacctacggagcctctctcacaggtcccagggagcagcaattcttgatggacgtgccctacttcctatagcagctgcaactgtcgatgcaccctggataaatgaacaaatgccctctaatactttctagatgttggttggaatctgatgtagtatacattcttcctgtcctttaacacacacacacacacacacacacacacacacacacacannnnnnnnnnnnnnnnnnnnnnnnnnnnnnnnnnnnnnnnnnnnnnnnnnnnnnnnnnnnnnnnnnnnnnnnnnnnnnnnnnnnnnnnnnnnnnnnnnnnnnnnnnnnnnnnnnnnnnnnnnnnnnnnnnnnnnnnnnnnnnnnnnnnnnnnnnnnnnnnnnnnnnnnnnnnnnnnnnnnnnnnnnnnnnnnnnnnnnnnnnnnnnnnnnnnnnnnnnnnnnnnnnnnnnnnnnnnnnnnnnnnnnnnnnnnnnnnnnnnnnnnnnnnnnnnnnnnnnnnnnnnnnnnnnnnnnnnnnnnnnnnnnnnnnnnnnnnnnnnnnnnnnnnnnnnnnnnnnnnnnnnnnnnnnnnnnnnnnnnnnnnnnnnnnnnnnnnnnnnnnnnnnnnnnnnnnnnnnnnnnnnnnnnnnnnnnnnnnnnnnnnnnnnnnnnnnnnnnnnnnnnnnnnnnnnnnnnnnnnnnnnnnnnnnnnnnnnnnnnnnnnnnnnnnnnnnnnnnnnnnnnnnnnnnnnnnnnnnnnnnnnnnnnnnnnnnnnnnnnnnnnnnnnnnnnnnnnnnnnnnnnnnnnnnnnnnnnnnnnnnnnnnnnnnnnnnnnnnnnnnnnnnnnnnnnnnnnnnnnnnnnnnnnnnnnnnnnnnnnnnnnnnnnnnnnnnnnnnnnnnnnnnnnnnnnnnnnnnnnnnnnnnnnnnnnnnnnnnnnnnnnnnnnnnnnnnnnnnnnnnnnnnnnnnnnnnnnnnnnnnnnnnnnnnnnnnnnnnnnnnnnnnnnnnnnnnnnnnnnnnnnnnnnnnnnnnnnnnnnnnnnnnnnnnnnnnnnnnnnnnnnnnnnnnnnnnnnnnnnnnnnnnnnnnnnnnnnnnnnnnnnnnnnnnnnnnnnnnnnnnnnnnnnnnnnnnnnnnnnnnnnnnnnnnnnnnnnnnnnnnnnnnnnnnnnnnnnnnnnnnnnnnnnnnnnnnnnnnnnnnnnnnnnnnnnnnnnnnnnnnnnnnnnnnnnnnnnnnnnnnnnnnnnnnnnnnnnnnnnnnnnnnnnnnnnnnnnnnnnnnnnnnnnnnnnnnnnnnnnnnnnnnnnnnnnnnnnnnnnnnnnnnnnnnnnnnnnnnnnnnnnnnnnnnnnnnnnnnnnnnnnnnnnnnnnnnnnnnnnnnnnnnnnnnnnnnnnnnnnnnnnnnnnnnnnnnnnnnnnnnnnnnnnnnnnnnnnnnnnnnnnnnnnnnnnnnnnnnnnnnnnnnnnnnnnnnnnnnnnnnnnnnnnnnnnnnnnnnnnnnnnnnnnnnnnnnnnnnnnnnnnnnnnnnnnnnnnnnnnnnnnnnnnnnnnnnnnnnnnnnnnnnnnnnnnnnnnnnnnnnnnnnnnnnnnnnnnnnnnnnnnnnnnnnnnnnnnnnnnnnnnnnnnnnnnnnnnnnnnnnnnnnnnnnnnnnnnnnnnnnnnnnnnnnnnnnnnnnnnnnnnnnnnnnnnnnnnnnnnnnnnnnnnnnnnnnnnnnnnnnnnnnnnnnnnnnnnnnnnnnnnnnnnnnnnnnnnnnnnnnnnnnnnnnnnnnnnnnnnnnnnnnnnnnnnnnnnnnnnnnnnnnnnnnnnnnnnnnnnnnnnnnnnnnnnnnnnnnnnnnnnnnnnnnnnnnnnnnnnnnnnnnnnnnnnnnnnnnnnnnnnnnnnnnnnnnnnnnnnnnnnnnnnnnnnnnnnnnnnnnnnnnnnnnnnnnnnnnnnnnnnnnnnnnnnnnnnnnnnnnnnnnnnnnnnnnnnnnnnnnnnnnnnnnnnnnnnnnnnnnnnnnnnnnnnnnnnnnnnnnnnnnnnnnnnnnnnnnnnnnnnnnnnnnnnnnnnnnnnnnnnnnnnnnnnnnnnnnnnnnnnnnnnnnnnnnnnnnnnnnnnnnnnnnnnnnnnnnnnnnnnnnnnnnnnnnnnnnnnnnnnnnnnnnnnnnnnnnnnnnnnnnnnnnnnnnnnnnnnnnnnnnnnnnnnnnnnnnnnnnnnnnnnnnnnnnnnnnnnnnnnnnnnnnnnnnnnnnnnnnnnnnnnnnnnnnnnnnnnnnnnnnnnnnnnnnnnnnnnnnnnnnnnnnnnnnnnnnnnnnnnnnnnnnnnnnnnnnnnnnnnnnnnnnnnnnnnnnnnnnnnnnnnnnnnnnnnnnnnnnnnnnnnnnnnnnnnnnnnnnnnnnnnnnnnnnnnnnnnnnnnnnnnnnnnnnnnnnnnnnnnnnnnnnnnnnnnnnnnnnnnnnnnnnnnnnnnnnnnnnnnnnnnnnnnnnnnnnnnnnnnnnnnnnnnnnnnnnnnnnnnnnnnnnnnnnnnnnnnnnnnnnnnnnnnnnnnnnnnnnnnnnnnnnnnnnnnnnnnnnnnnnnnnnnnnnnnnnnnnnnnnnnnnnnnnnnnnnnnnnnnnnnnnnnnnnnnnnnnnnnnnnnnnnnnnnnnnnnnnnnnnnnnnnnnnnnnnnnnnnnnnnnnnnnnnnnnnnnnnnnnnnnnnnnnnnnnnnnnnnnnnnnnnnnnnnnnnnnnnnnnnnnnnnnnnnnnnnnnnnnnnnnnnnnnnnnnnnnnnnnnnnnnnnnnnnnnnnnnnnnnnnnnnnnnnnnnnnnnnnnnnnnnnnnnnnnnnnnnnnnnnnnnnnnnnnnnnnnnnnnnnnnnnnnnnnnnnnnnnnnnnnnnnnnnnnnnnnnnnnnnnnnnnnnnnnnnnnnnnnnnnnnnnnnnnnnnnnnnnnnnnnnnnnnnnnnnnnnnnnnnnnnnnnnnnnnnnnnnnnnnnnnnnnnnnnnnnnnnnnnnnnnnnnnnnnnnnnnnnnnnnnnnnnnnnnnnnnnnnnnnnnnnnnnnnnnnnnnnnnnnnnnnnnnnnnnnnnnnnnnnnnnnnnnnnnnnnnnnnnnnnnnnnnnnnnnnnnnnnnnnnnnnnnnnnnnnnnnnnnnnnnnnnnnnnnnnnnnnnnnnnnnnnnnnnnnnnnnnnnnnnnnnnnnnnnnnnnnnnnnnnnnnnnnnnnnnnnnnnnnnnnnnnnnnnnnnnnnnnnnnnnnnnnnnnnnnnnnnnnnnnnnnnnnnnnnnnnnnnnnnnnnnnnnnnnnnnnnnnnnnnnnnnnnnnnnnnnnnnnnnnnnnnnnnnnnnnnnnnnnnnnnnnnnnnnnnnnnnnnnnnnnnnnnnnnnnnnnnnnnnnnnnnnnnnnnnnnnnnnnnnnnnnnnnnnnnnnnnnnnnnnnnnnnnnnnnnnnnnnnnnnnnnnnnnnnnnnnnnnnnnnnnnnnnnnnnnnnnnnnnnnnnnnnnnnnnnnnnnnnnnnnnnnnnnnnnnnnnnnnnnnnnnnnnnnnnnnnnnnnnnnnnnnnnnnnnnnnnnnnnnnnnnnnnnnnnnnnnnnnnnnnnnnnnnnnnnnnnnnnnnnnnnnnnnnnnnnnnnnnnnnnnnnnnnnnnnnnnnnnnnnnnnnnnnnnnnnnnnnnnnnnnnnnnnnnnnnnnnnnnnnnnnnnnnnnnnnnnnnnnnnnnnnnnnnnnnnnnnnnnnnnnnnnnnnnnnnnnnnnnnnnnnnnnnnnnnnnnnnnnnnnnnnnnnnnnnnnnnnnnnnnnnnnnnnnnnnnnnnnnnnnnnnnnnnnnnnnnnnnnnnnnnnnnnnnnnnnnnnnnnnnnnnnnnnnnnnnnnnnnnnnnnnnnnnnnnnnnnnnnnnnnnnnnnnnnnnnnnnnnnnnnnnnnnnnnnnnnnnnnnnnnnnnnnnnnnnnnnnnnnnnnnnnnnnnnnnnnnnnnnnnnnnnnnnnnnnnnnnnnnnnnnnnnnnnnnnnnnnnnnnnnnnnnnnnnnnnnnnnnnnnnnnnnnnnnnnnnnnnnnnnnnnnnnnnnnnnnnnnnnnnnnnnnnnnnnnnnnnnnnnnnnnnnnnnnnnnnnnnnnnnnnnnnnnnnnnnnnnnnnnnnnnnnnnnnnnnnnnnnnnnnnnnnnnnnnnnnnnnnnnnnnnnnnnnnnnnnnnnnnnnnnnnnnnnnnnnnnnnnnnnnnnnnnnnnnnnnnnnnnnnnnnnnnnnnnnnnnnnnnnnnnnnnnnnnnnnnnnnnnnnnnnnnnnnnnnnnnnnnnnnnnnnnnnnnnnnnnnnnnnnnnnnnnnnnnnnnnnnnnnnnnnnnnnnnnnnnnnnnnnnnnnnnnnnnnnnnnnnnnnnnnnnnnnnnnnnnnnnnnnnnnnnnnnnnnnnnnnnnnnnnnnnnnnnnnnnnnnnnnnnnnnnnnnnnnnnnnnnnnnnnnnnnnnnnnnnnnnnnnnnnnnnnnnnnnnnnnnnnnnnnnnnnnnnnnnnnnnnnnnnnnnnnnnnnnnnnnnnnnnnnnnnnnnnnnnnnnnnnnnnnnnnnnnnnnnnnnnnnnnnnnnnnnnnnnnnnnnnnnnnnnnnnnnnnnnnnnnnnnnnnnnnnnnnnnnnnnnnnnnnnnnnnnnnnnnnnnnnnnnnnnnnnnnnnnnnnnnnnnnnnnnnnnnnnnnnnnnnnnnnnnnnnnnnnnnnnnnnnnnnnnnnnnnnnnnnnnnnnnnnnnnnnnnnnnnnnnnnnnnnnnnnnnnnnnnnnnnnnnnnnnnnnnnnnnnnnnnnnnnnnnnnnnnnnnnnnnnnnnnnnnnnnnnnnnnnnnnnnnnnnnnnnnnnnnnnnnnnnnnnnnnnnnnnnnnnnnnnnnnnnnnnnnnnnnnnnnnnnnnnnnnnnnnnnnnnnnnnnnnnnnnnnnnnnnnnnnnnnnnnnnnnnnnnnnnnnnnnnnnnnnnnnnnnnnnnnnnnnnnnnnnnnnnnnnnnnnnnnnnnnnnnnnnnnnnnnnnnnnnnnnnnnnnnnnnnnnnnnnnnnnnnnnnnnnnnnnnnnnnnnnnnnnnnnnnnnnnnnnnnnnnnnnnnnnnnnnnnnnnnnnnnnnnnnnnnnnnnnnnnnnnnnnnnnnnnnnnnnnnnnnnnnnnnnnnnnnnnnnnnnnnnnnnnnnnnnnnngagcgctctctctctctctctctctctctctctctctctctctctctctctctctctctctctctcccaggctctcagccaccagagcaagtgggaatgccaagatgaggtagaaaagggctctcaaagccctgtgaggtttacacagaaaacaatagtgagcatcacatgtccttctgaaactatgttctcaattccacggattcttgagatcattgatccggacattctacccacagggagcttttctcagaagccctcttacctcccaacacatcttgaaacaacacacccttggctcctccttggttttcaaatccatcatatcgttattacagtttgtttccagctaaccagcccctgcacgcccagcccccctgcatttccagcctctgcatgcccagcccctgcatgccctctgactctcaagttttaatgtttgatgtaatcctcaggacagccctgggaggcagagctgtcagaactattactcttcatctgcatgttgaaaaaaatcacataactgttaaccgttaattcatgaacctactcaagaaaatatttgttaaatgcctgcaaagtgtcggacactatggtagactccaggcacaaggaaggatgggaaaaagatgtggccctggtcttaagggagctgagagagagagagagacagagagagagagagagagagagagagtggtcaagaggggcacaagcatcccattgagaatgaggggagggtgaggagaggaagaggtcagcgagcaaaatgggcagccgaggaccagcacacagaccctgtgacggcagagtcgggtgtgcctgaggcacagagggctgggaaggaggtagggcacacagttcaggatgaaaacatgactagagtcccccccccacacacacacacctatggaaaggccaggggttttattcctgatttaggataaactctggagttttaacagaaaggcagaattgtgcttctaagcggtgtctatgtgcaaaggcggggcaggcaccaggggccagcagtccagatggacacatgaccatgcaaaccccactcactgcagctgcgtcacctacttgtaaagcaatggagacgtttgattcttgctcgtctatggatggggaacctgagccatgaggaaatgctccttctggggcctttggttcccagtgagtgtagaaagtacattctgtgtgccacagggtcacactagctgacggaggtgtaatgccactctcagttaggtttctcgaatttcccgatactgcaggcactcgaggccatcgacaaggctcttcagctgaagcccagggacccaaaagtcgtatctgaactcttcttcacaaaaggaaaccagctgagagagcagaaccttctggacaaagcttttgaggtaaggccaactaaacagtcattaagtttacaggtttaaatgaatatcacagccaatgagggagtctaggtgtaaactccagtcattggtggtctgtagcatgaatgttgtgattaattgacagtgctacagactcgcttcctttggcctctggtttttgatcacacacacacacacacacacacacacacacacacacacacacacacgcacacgcacacgcacacataaacacacacatacatacacacatacacacacactcaccacacacacacatacacacgcacacacacatacacacacacacacacacactcacactcaccacacacgcacgcacacatgcacgcacacacattcgcatatacacacacacacaccaccgcctctgtgttatctcttaaaagtatggtagatggggaagcattcaaagctcccaaattctggaattctgaagagacacctacactgtgtggtgatatcttgcttgtacaaataaagcctgtctgggggtcagagaatggagcttgtcactagctaaccatagaggtcgggaggtctgtacagacagacaggaagtgaggtagctgggagaaacaggatcgatctctgctctgctgagacgctgaggaggtaaggtgtggctgtggcttgatatctcaacatttccctctatgtctgacttcaggtttttgttatctagaccaagtatgagctccatgtacaacaccgtctgttttgtcttcaagaagctcggtcacagctggactggagcccaagtagctttgggcacttacatgtctgtgacacctgccatcacctctagacttcctcttatccccagggctctgtctttcctgggaagaccctccagaccatccattcctgcagtgacttttgttctaaagcttaataaatatcacatcatgggtggctcagtgggccaaggcacttgcctccaaggctgaccacctagaacctgcttggcggaaggagagtactgactcctccaagttggcctctacctccacatgtgtgcagtgacatgcatgtacctacacacacacatactaaaatgtttaaaaacattcctatgttagcaggatatagagatataactggagacagagaaaataggatgacaggttcaagcccagtgagttccagggtaacaaggctgtaatgagagactctgtctcaaaaaaaaaaaaaaaaaaaaaagaaagaaagaaaaaaagaaagagaaatgaagaaaaaattaaacactccatcattaaggtatcaagtcatttgcccccaagcagctaaaattacagaagtgtgccaccacatctcagctttgaagagcttccaaaaggcagaagaaagaggtgttgtgacccctataaagcaatgtgagcgtgttgctttctttagatgtttagcaacaggttggaggttgaagggcctgggctatggttaagctgttagaagagcaccttgggttctatggtttcctttgtcttttcttcttcttcttcttcttcttcttcttcttcttcttcttcttcttcttcttcttcttcttcttcttcttcttcttcttcttctgcttcttcttcttcctcctcctcctcctcctcctcctcctcctcctcctcctcctcctcctcctcctcctcctcctcctcctcctcctcctcctcatccttattgagagctggggataaagcccagggcctcacatggactgagcttgtgctctgcactgagctactctccttagattctgtaatgctgacagcagtgctcctcatcagctcatttatggtgaggaaggctaataagcacagccttcctgcagagccagagaaacgagctgtttcagaagtccctgggtccccaccagcaggccagagatctgctgtcactgaagcccctggggtctctccacttcagaaccatcaactctaaaaggatagcagactaaacctgccacccgctaagtggccgttagcgaccagggcctccacacaggcaggggtttgcacagttccagggcaccttagacactgtgtctcatgtcctaacatgaaactttccttctctgctagagctacgaagctgctgtgaccctggatcccgaccaggcacaagcatggatgaacatgggtggtatccgacacatccaggtaggggtggcactcactgtgttcccatcctaaccctggctcagaagccactgtttgtagtcagagtttctctcccacctggtccacaactgtctagccccaagtgagacatagagaattttattagttagaaactgtttggccgatggttagggcttcttactggctagctctctcttaattatgaacccattactgtaaatctatgtattgccacaaggctgtggcttaccagtaacctggtatgttactccttcgtcagcatggtgtctctctccaggcttctcctggttgggtagccctgcctatgctttctgcctggcttctggccaatcagtgttttattcatcaaccaataagagaaacatatacagaaggacattcccatcaactgttcatcatctctcttaaatcatttcaatacttaaaacaggcattttgaaagtaaaattcagaagagctatgttttctgaatagtgaatatcacgggcctgtttaaatgtttataaactcaactccacgatactgtggatcgtaaggaaatcacatgtgtgagaagaagggttaccagacaatggctcaggtctgagtgccctaacctgtgaagcctgccaacgccccagcaataccagactgttaatctaaatacacccttactatttcttattttttattatatgtgaatgtggttgtgggtttatacgtatgagtgcgatgccttcagaggtcagaagagggtgtctttgggtcccctagccctggagttaggggcccttgtaagatgcccagcacaggtgctgagaactgaacgtgggtcctctgtatttaatgttaggaagctctacccagccccactcctctcattccagaccctggccttgagaaagcctgctatcagtggctcctccccctgggatgctcaagaccacacctacaggctgtttaagattgggtcctcacctgccacctggttctcccttgtggtttctccccttcccctgggagcacccgggaatgctttgctcagattaaacctgattttacctatttggcctaatctgatttagtgcatcagcagagaaacacttttcatttataactttctcaggtggaatataccagaaattaaagttcggttgttaatttgaagtagaaaggatatacctgagagcattcaaaagagtaaatagtgtaattatttctgtatttaaactcagagctgtatgttggtaaaacagagctctggagattgaagcaatatctgctgggtataatgttttcaaatttaattgacattcatttaaaagaaccagcctttgtcactgcagacatcatggattagcttgagcaataggaaactcccccatccacagtgaaacaattcaatgggtaaatttgaataatgtgatctgatataaatgtgtgtagtgggcacatagcttggcagtggtcattctgacaccaccataaaagtctaggattatcactgaaggcacacaggaacaatcctgaactttctgtgtcttttgcaagagtgttcatcactggagaggtggctcagcggtaaagagcatcagctactcttccccaggtcctgagttcaattcccagcaaccacataatggctcacaaccatctataatgagatctggtgcccttttctggcttgcaggcataaatgcaggcagaacactgcatgcataataaataaataatagtgttcatcacaacgtcacccatcctggtcctagcccctgccctgtgcctggggtatagagctctgagggatatggaggtgaagaattgaaataaggctttgagaggaggtagcacaggaatagggaaaagacagtgaaggttgtggctgccccaggaaggaagggacatagtcacacaatgtgtctaaggtcagtgctgtgacctgaagtgcctcagatgtggacagtcaagtctaactgcagcccctgctgctaattgtatggggtatttttagtgtgtctgcatttggatggtaggccattccatgaggtccattacagaagcctctcttgatggtatcttgtctgttcagaaagtgtcaggctttgaacaatctgcattttgggggttagggatgctcactctctgatacgttccatgaacttttatgtgaggtgaagtagatgggctggaatttcaagctgcaatgggagtctgtcatccatgccatatttcaaatactgtttcagcttggcttgatgacgactttgcagaatggtgttgtctaaaagaactctcggtctgatgagggtgtcccatgtcttcactgtccaaggagcagtgactggccatggcaacggggcacaggaaatgtgtctggtatgactgatggtttttagtcttaattaattaaaattcagttctagaaatcagataattctagttcctacatagcatagaattagagtcattgacttaagggatatgatttctttttccaaaataaataaataaataaacaggatttacagtttcatcaagaaaagagaactttgaagtagagaggggaaactggattttgtgtaaaaaaaaaagaaacccagtgatctgaaacaatgccaaagttaaggatgaggcctaaattcagggtagcctccagggacagtttgagggcctgctgcgtggagaatcttgccatcgagcccttggatccacagcctgcaggtgcccaaacgtacattaagcttaacagaaaccagaggcttggaggaggagttaacaaaacaacaatgcagcagaagtgtgctccttgttccaagtcataggcataaattgtcagatataactgtctactgcacaaaccagtgcaggcttctcagtgtgcaattcctttttctcttggtttttggaggttgattttgtttgttgttgttgttgttgttgttgttgttgttgttgttttccggcatttccacgccgtcttacagcagctgcacgcataaacaaacagcatgagaactagaaagtgagtcatggagactgaacagtctactcagtggagactgaacagtctactcagtgatggggggtagctcgagcaccctgttgaggtctcactgtatatcaggccgggtctaagctcttgatacacacgaacacatgtgggaagatgcttccgcctaggtaggcattagccgctggtttggggaggtgctgttttgaattgtggtgaagtttaaaacatcgctgcgtccacccacgtgggagccgcagctgaggatgatgtaaaagtcgatgtgttgttttagagtgggaagaaattgggcagctccccggggaaggcgtaaagccccagataggagagacggaggaaagagtcctagctcagtccagcctggtgaatcgatgagttcctattttagtctcaggagtgtgtgtgtgtgactccaaggtgttaaggtagaagcttcacctcagtcgctggcatccatatatacccaaagagtctgaaatgttatggtggaagctccacccaggtccccctccccgatctccctccaaaccctgctgcatctcagaaagccctgcagagatgggcaacaccactcccacagggtgtttaaactgctcccacagaaaccagacttgtggtttttccagtctccctttcccatctcctgtggggggaagaggggcgtggcctggaaggccattcgggagcactgcatccattaaacgtgggctttttctaattcggtctgatgtgggtggctgcatcgacggagaggcttgcttatcggggtgcagaaacttttcagaaagcaccagcatcaccgagagcccatctcagctgtgtctccagagctgcctgcccagtctcagccacctggagtcccctccctcaacttgcagccactgttgactgcttatgtgacctcagagaggggccccagaagtcctgcaagtctcatgagcttcccgcgccttgcttgctgaggaaacagcagacactgtaacagagagtcttgggctctgcaggactcagaacggcaaggctgcactggaggagggagatgagcgttaggccgtagagaggggagcaggagaagctactggccctgaccagctgggcccaggcacacacaagttattaaacagatgaatgctgacaagaagtgggggcgggtgtgctcagcaggtcagaggtcccattccttcttccctccctcctgcagcaagtgtctagctggtacttttcaaccacataccctggctaggagataaacctgtgtccatctttaaggggtttgggttttttttttttttaagatttatttcctttatatgtgtgagatttgcctgtttgtatgcatgtatgtacgtgcaccgtgtgctgccgtgctcacagaggtcagaagagggtgttggatcccctgaactggagttacagacggttgtgagccatcatgtgtgcatgtgtgtgctgtgaatagcactgaccccaagggccccctagaagaacaagtgctcttaaccatcctcccatctctccagccccaagtccacctttaaatcaagcctcaaattgtgtaaaactgcattaggcaaaggctgatattgtgtttcaagttgaagattagaacaaacttagaaaataaaatagatgtctgtttaattattgctctccctccctccctccccacccccctaccccaagcctatttgcttaccgagaacagcagaccagtgctaacctcccaagaatactacaaaaagaccgcctcctccttccccttactaggaaagctgaaaaatgtgtttctgccatttaacttatggtgtagcagctatcagactccacgttctccagctggtctggttcgttcttccttccttccttccttcctttctttctttctttctttctttctttctttcttttgttttgttttttgagacagggtctctctgtgtagctttggagccatcctggagtccaggcttggattaaaggcatgtgccatcaatggccccggcatggtctggttcttaaaacaaatggattcccccaaagcaccccaagagataaggattaaaatattcacagataaggtttcctttggggaacctgaactggaagggcaaagggcggggagagagagagagagagagagagagagagagagagagagagagtgtgtgtgtgtgtgtgtgtgtgtgtgtgtatgtgtgtgtgtgtggggtccttcctctcatcctcagagggttatgctaagcaatctttctcttgttctaccccccacccccagggaagctatgtgtctgcaaggggctattatgagagagccctgaggctggttccagacagcaagctgctgaaggagaatctagccaagctggatcgcctggagagaaggttacaagaagtcagagaaagggatcaaacatagacccaaggacaaagtcagtgggactcagcaggctggatgagaacagaaggaggcctaacacacagtgggcccgccagccaggcagtcccctcctggtggcacagtagtgctgaaagagttgtttccttgaagggacaaacagcaaagaggagcaaacagtctgaagggaagggaaatagcatgtgtgcttacaggctcctcccgtgtcactcccagtccccaggatacagaactccattcttactgtagcccagaaacacagaagcttgaagttctgtagaggagacagctattggtaaggaaggctgtatcctgtgaagtcagcccttggggaaatctactcgtagaagttagttaattctcaagaatccagagtgggtggtgaagagcattggtagaggctttgtgaaggctctggggcagagcacttgatcggcaggcttggtctaatatcccccaagagtatcactgaggacctttggagaagtacattaaattccactctgatagacgtttttttccagtgcctaaaacacgaggggaccgtctagaatcatacgtgggtatcattatctctacaggagaaagcttcctgagcagttaaaaacaaaagttcagattttgcttgattagttatgggaatatttttaagtgtttgaattgtattccagacgttgctagagttgtgtctccactctgaaacttcccagtgtgttagccaaaagattgctgccaccttgaaatatgctgcttgtgtgtggagcggtggggtgcagggtgcactctgcctggaagtgttagagagccagtccagagaggtgctctcctttattctcttaaggtcaagacatcatgagatttattatttttgaaagatatatttaagcatcaaggaacctttacattgtgttgcagaattcctccaggactgagttgaggggaagagagctctatttattgaattttgaggtttagtgggaattgtattcttaaaagacaaagtgactctctgcttggcaagttttcagactccacagagaatgctctgaaactcttgggtaaaatctaaattcataattttttaaaaatatatttatatttaaaaatgaggaaggcaaagctgaaatcataatttgacattattttagtgttatttattgtataacttataaaatatttaatatatatatatatccacatgtctgattttttttcctctgtacatagcagctgccaaaaccaatcatatgaaaactgtaaaacaggaaagctttaacaatctcccctgaattatactggttattaatttccacttatggaaagctaatggaattaggggtcagctcagtgtttgggtatcagtgaaggagctggagcacctgcttttaactgggtactaaccactgaaaacagaaaccctcaggtaatgcaggtcccgaagctgagccagctgtcacacaaccatgacaaggttgtctcacctgtacagccaggccagagggagagccctctgcttcttgcaacccagcattgggatgcagtgcctctctgtgttatttttttttctggcaggtaagttgaaataaatggctgaaaacttatttgaaaaggcatggtgaagccagggagtggtggtgcatacctttaatcccagcactcgggaggcagaggcaggcggatctcagtgagttcaaggccagcctgatctccagagtgactgccaggacagccagggctacacagagaaaccctgtcttgacccctgcccccctccccaaagggggtttgactcagtgcacacctacgctttggagctagtatctgtcactatcacctgattatgtaattgtctgtcagtgttacatatcataaattgatccggaatctcaatttcttccatctaagacataacatctttagtaccaaggtcaaaagtatgtactacagcgtttattataaagcagttccaagccccctaatttggaaagcagggggtacttggcaacatcttagtactactttttagaatagcgtttgaccaaaatgggtgcatggaaaaccaatgggacagattgaactgcagagtttgacataactttcccttgtgtaaagtgctacagaaggtctcagtgtaaacttgttagaataattaaaaaggcaattacaacataaacatttctgaggagaaaaagccacacattgtctaggagattgccgccatcaggcctctctcctttctcctttgtctgcccattttggcacctccctgagcagtaaaaacaagcactgcttaaaaagaaaaaacgaaatctgcttgctttgttggctcggatattaaataagccaatgagatagttttcatagtagaaatgttgcctgggagaagaaaatcagttgtgaagtgtttctcaaagctgttgagtgtgtcttgtaacatgctatttggccctggtgatgtggaataatacctgggagtcattacagtagaaagagagagcctggcttgtcttgaaaatgcatctgatttgccattggcaggcgtgtgctccatgagtgactggagagctgtttctgaaacctaggagtggagttggctttgtgcactcaagtactctgctggcaacactagcattgtccttgtcttcatcactggtactgagaattgaacccaggaccttgtacataccaggaagcactccccactgagctcgtgtttttgcttttttttaaaacaagggtccagccctgtgtctcagaattctgtaaccctgggttacagaattctgtaacataaccctgggtatgttacaggaggccacaaagagtgaatcaggagttgatttgccttggttgatcctccagtatagtggctcctggaggtctttcctcccttacacattgagccattcacatctgtgtaacccctcccccaccgttccatgtcaggcctgtcaatcatcccacctagacccagtccttgtcatgaaatccatccagtggcaggatattcacttgccctttgacacagaaactataggaatggctttgttggcttatttttaatttagggattattcagtcaggatttttcaaagtgattcaaatgtttcaggttattaacccttttataaaatctgttttggtggtgtaactcaggtgaatgaaccaaaaatgcagaaaccatagggaaataagtactttgggggtgctgggtgccttgtttggggtgctgggtgtttgtttgtgtggttctggggctagaactccatgcacaccaggcaagctgtctgtcactggctaccagtgtcatctcagccctggacttgtttatttggaaggttatgacaaagcaaagaggtttctggtctttatcagtatgcaggttctcctctgaagtctgcagcagagttttccacaggcctttttcagttttcaggcaagactaaataaaaaattccacaccacaccgcagaagcccacctgaggtgactgaaccaagggagaaaagaaagcaagtgtcccatttcttgttagcaaatggtctacatccttgtgattacagagcagcatggacttgtaggaggcctcccctcctgcacagggcctctcagcactgtctgccttgagagaacagctaggattcttccaaactccctaagacccagctctctgttgccagcaaggtcctacagagctgactactctaacgaggtttatgatttctaccaaggagctgtgaataatatcgtgaaatttttatttctagctactgggctaaaatgagccaaagaattctaaaggatgagtcattgctctgtgggttggtcaaggctattattcctagactgactggcaggtagctgagtagggtgtctttatgctgtggcaactgaactataatttgtccttctatttagaaaattcttgggtgtcaaatggagaggcaccaccattgccagttgcacacactaggttgtgtgaggttgccaaagagaaaaaaatgaacaaaaaacctgatgtctttttttactcttagaaaatgtccatggcacagagattgtctcttcctgcctggcacacagacactagggctttgttatttagttcctgattgtactcactaaaacctgtttttggtgtcctgagtgtggtggcacacatccttagtcctagcacttgggaagcagaggcaggcagatctctgagttcaaggccagcctggtctacagatcaagtttcaggacagccagggcaatatagagagaccttgtctcgaaaaaccaaaccaaacaaacaaacaaaaccacctttaaaaaaagagtcataggcaaaaatgtctgctcttgtctgtggtggatccatccaggggaatgataaaccttcatgagattggtaatgacaccgaaagcatgaggctatggtagaagtaggctgtttcgttttcttgttttcaaaaatcacactttaactgtacataggcatcaccctaatgcagcaaaacccaagtctctaaatgccaccattttacattgagcagcaaaacccaagtctctaaatgccaccgttttacattgaaaaagtgtaatgtcgttcaaacattcctttcagactgtagctgtataagctaagactttagagtaccaagaaccaatatttggaaacattataattcttgccattattctcagtttccaatgaaaacatgttatatagttatgaaaacacttctaatgtttttgattctgtgagttctttgttccaagagaggagataaagtaatctgagtacaaaatgtgggttcgtattagagaggaacaacaagatggataaaatacctggtgcagtcaattggttcatattaaaatagtccattttcaccaccagggctctttgggttaaagccattggcaacaactttaaaaacaacaaaacaaataaacagcacctcacaatacactgtcctggtccaagtgtaaatacaggtcaccaggaaatgcctgcaagcagaggtccaggatatctcctccttgtcaggggcatatggtatgtattagtagtgagcctggaagttctggctgtgcataccttttgggggttatttagcggctagcccatggtggaggcccactagttcaggattcttcattctggggtcattcactctaaggagtcaccttaccagggcaggttattccatgtcacagtaaagtttgtcacccatgaagcactcactgtcctgtccagtggttcccgggataccacgagcctctgaaatgcactaaaaagcactatgtatctgtggagataatgatttaagtcctgactgttcttgtaacaaccacaacaagggaagactaggctgcccaagtgtgttacttcacaatagtaactcttactttacagttgtgcttaaaagctcttatggtgaccctgtcactttcctgggggagtagataacatcttctccttgggaactgaggtgcttgtagaagacagtgcttgttttgacatgtggaagtcactgtgtttgtggtcaggaccttggtctttcttcctgctactcaatgttcctgttttggttggttgtatataaatgtacatccgtgttatttttgctgtgctgcttaaaatatttctccgtttaagtctgactgtatactttgcctaagtctttcaaaaataaaatttatgtaaatgtctattttatataaaacatgctaaaaataagaattctgtctggcctcagtctctcaagttctgtggctagaatccaccagtagcctttttgctggtggatctgagcttcaaaagcaaaggtggcctctctctgtcatctttcaggacacacagtgactgcttcccacccacaccaaactctacctccaggccaaactacctgctgctagcttggtaggtgcagatgggagttagaaagcaagggctctctggcaacatcctgtactccatccacaggcgtacctggacccaaccctatcttacccgcaactttgtcctctccattaacgtcttttactggtactgtcttaaagctgcctaatgggtggggacacattcattcgatcactagcacaaaaaggggagaaaacaccgaaatctccaccaaaacccaggaaaagtcctctctttagtcctccattttgtcaataactgctaggttcttttccaccacaatcatgctttttccctagtgacctgccatgtttgctcaggactgtttgtcacaccacaggaaaaaaatgcctctcctgtcccccagcaaccattacctgcctttatatcctcagggagagagggcatcacagacactgcttgggtcttgtgctgatcaccaaactgctgagagtacaagaaagagtacagccacactttctgaataggaaattgctactgaccaactctagggaagatgtgtccaaaccaaaggcaagatattccgtgtgccacaagttcactcagggcagcccagacccctccctgcgactaatgttcttttcttttacttatccccatgttgtgttattttaaatatcatcgcactgtttctctactactgtagacagtttctacttgccattcattatctttgtcataatccaggcaaacctgaccccgtctctcacgcacctgagcatggcatggcaggtgtctgtaacctggccctttaaaagaaaaaccccacccacttcctcccctcccccctgttccttacagccccccctctctcctttcttttctctcaccccttttcccttccctctctaatgaaacttcccactctgcctggcatttttgtccctcacccgccatggaacccaccaaggtcccccatgtattttgttcctaacggtcttattagtgggcctgaagttatctagccacctgccagtctgcatcataattcataccgatgggctcttttcccatggatggaaaggctttgttagggtgaacctttgtggatgaattctctacattaggatagggtctcccattagacagagggctttcaactctggtaacaacaatcatgaccagaactggatcatggcgcccctgcagttactaagcaacacagctgcccagctgcggatgatagctttactccaaaggcttttgggtgggttttatattacctcttactgaaaaagaatgtttagactgtgttcgactctgagtgtcattggaaaacaatgttcacctggggtaaatgagagctcggtggagtgggtgggtgggtggggtgtgcaatcctcatggcactggggaaagaaagcagaactctgggaggaataagttagccagccactagccagccagctcacagtgggatgcttccaggaggggacacaagcctggaaggtgaatattgtaccacctctgccccaagcccactgcctcatttctgtggacttggatcatgacaatcaagtaacactctttgggtgcctgcacctgaacttgccattttgagtctactgcttccatgtgtctgccctcccaacttcaagagacagtgaagccctgggcggaggggcccaggattgttgatatatgcaatgtcctttcaggcttgccctttgagtctgatcaaatataactcaactaatagtctggcttttattcctttcccatcctcagcgtaacttattaccatacagtattgatggagaaaatactgacatgataccctactaatgaattattatactcaccttaaacaacagatcacacagcattggctcaggctgttgaagtggatggtagacactacaacccaggaaagtagtgagtgtgaacattcttgaggagcaagagcttggacaggcttcttagaggcccaacagcagttaagccttgaatctcctgttttgagaagtgctcacttgcatctagcgtggattcccgggttcagtgccaccgtctctgcatcctactgtagtctgcagatttcaggggtctaatatttcaatcccaataaccacctccgttcctcagatctgttgcaaatcccatgggggatttggggcttactgctacggagcctcctccttagagcctggtggtcctggcatctttggtgcagactcagctctctaaccttgacacacaggaggggaccttcagccatggggacacctctcccggggccaggttggggcaggaggcactaggaaacccagaatgaccaggttgacagtgaagagaatgatcatgagagacacctgaacccggaggtgtgacaggtgcagccccgtgttgccctgagaggaattaaacagtcatttgagctcacttcctcacttggtatcagcagtctgtgggtcaggagggtgcagagctctcatggagcctctgtcgtggaatggactgctgctggcgacctgtaacccccagaacctagtaggtgagtgaaggcccctggatctgccaccaggtgaggctcactctccatggcttgctcgctctggatttcctatggttgcagtcactatgggcccataaattcccaaaggaaggcctgtcttggtggaatgctctcatctggggatttggggctttctactacggagcctcctccttagagagcctggtggtcctggcatctttggtgcagactcagctctctaaccaaatctagtgccagaggtagggctgtttctctcctgtcctgggccttgtcttgttagggcagcgtggggccagtggcagggctctgagcaacctgagctgcctgtggggtgttcctgcaagaatcccaaggaagttaaggagggggggggctgtgaaagctgagtgacttcagagtgtctgtgccaggcctgggaatctgactgaaatcttgacaaagtggatctgtaagcacaggctctgtgtgccgagtatagccacctgtgtgtgcttctgcggcgctgaggtgagaagcacacacatgcatgcaagtacccagaggtgccagaagagggcatcagagctcctccaactggagttaggcacttgagagctgccatgagggtgctggaaactgaaccctgatcctctggaagtgcagccaatgctcttgactcctgaaccgtctctccagcttcccaaaaagtacttaagacattttccaggaccctgtcttcatgatgtgttaaccttgagtaaccaatttatcttttgcttcctttctaattgctcacccagtgaagactgccagctgtctccccatagatctcatccccgctcccatggctgcctcacacttcaaaaatgctgttcataatgttcctgctgctgtctttttttggggggggggatgttgttgttgttttgaaacaaggtctctctgggtagcctctggctgtcctggaactcactctgtagaccaggctggcctcgaactcagagatccacctgcctctgcctcccaggtactgggaccaaaggtgtgctccaccacacccaggtcctgctacagtcattttattttggcttgtcagacaaagtcaagacaggtgaccttgctacataaagggaaagagaggggctggagagatggctcagctgttaaaggctaggctcataaccaaaaatataagggtaagagagtgagcaggagactgaaaccctcctgtgtttaacactgtaatgctttataaagttaaaccaagagccaacatgcagagggtaagtgtcacgcacagtctcacacagtcatttctggaggctgacacacagtagctgaagtaaatcctactgagtggtgtgctgtggatgtgctgagcgaacagatctgcgctctgtggcacagatatatctgatgggaacagcaaaagtcctaaggccagcacagcttcttgacaaagatcctgcaaagctgagccacgtgatggctgccatgccacctttggttttctctccacctgctgcatacttggggtgggggcttttagtatttgcataatttggggatattggattcatggagaattatgaaccatttatgccttctcccaggagtactgcttctaagctccccaggacagtcctgaatgtaccacccctcccccttttagggagatatccttatctacttgtaggtcttccttatgccttggaatttgtgagacgcataaagaaaccagaagtctctttgagactacgaaatagtcttgaaacatctgtctctgtacttacttgggaacaagatactcaaaacaaaggtcaacaagatttggtgggctagaggagttggccacagttcagattgcaagcctcttcccagtatacattcaggcaattacatggcatatacagcaacaaagttagattagatgaagttgcctcagccccacaaagacttatattgatgagcaaagtggagagtgaagacatgatagaagaataagatgtcaggacctccctttcttagaaaagttagcaatgcagagccacagtggtgtcatctgaccagggaacaaaagaatgccaggattggatttataaacaaattttataaagatacaaaaatataaacattgtattatgtcagaaattgaataataactgcagcagctttggcctgaggatttttcttggcgctctgaccattaagagttaataacacactacttgggacatggccgtctgcctgggctgacttgagattttgttttggtctagcatctttgaagacacaaaagcctgagaacaggctgtcaaatgcttgtagattcttaaaaacagggttatgagttaatgagtaaaaatggttataaaaggtatctgtttatcaatgatgtcaaaacttgaggggaaatgggtataaaagataattgtttatcaacaatgactaaatgagatccaagaggaagtaaaccacatgtccaaaagcaaaaatgatatgatctatgtcttgggacaacatgaatctatctctgcttactgaattctgtataaataaattagcactctgtctgttagtcagtcaggctgcaaggttctcaggaccatcatgcctggctcactctttcctttgcagactcctctctgggacttgtcaagcccttgggttgtcccctgaaaactttggccaccagcaatagtaactgtgtggaggacagttaatcattttcacatgaacacatgtgtccaaacacactatatgcttcaaatatgaacagttttaatcacctccgagctcacagatgactttattttcctaaataaagaactttacaaaacattattttataaaataattgggtttcccttttgggtaaacatttacaaagaaactgaaaagggccacaactgcttgttaactgaaaatgggtgaatttcttttctaaaaagtcctttatgtcatccattcacacttacaatctcagttcgctaaaattggcttgaaattgtgttagccctttaagtcacatgtccactcgtctggtgaggtcagttgggaatgtttcggttctctctgcagcatcagaaggctgcatcacaagaagcagagcctcccttcgtggatggtgggccatgtagtaccgttgatgcttctgccaccagatgtaaccgaccacgttgtgtgtcgcctccctcatgggaccagaaagctgctaggtacctagcgtacggctaagtacccagcatataacagcctggcagcgagcttgcgctctgcctttccttccctctggctggtgctttggggaactactgcttccccagttccttcccctccttccattccgtgtggcttccatggagaacgttagcttgctctgagagagaatgttaattatgaatagtgttctgcctgcatgtacccctgaacgccaggaaatggcatcagatctcactacagatggttgtgagccaccatgtggtcgctgggaattgaactcccacctctgtaagagcaaccagtgctcaagatcagaagaaagtgtcatgtctcctggaactggagctatacagatggttgtgagtcaccacgaggatgctgggacctgaacatctctctctattaagcaagtgttttaccacacattgatttatactgttttttgcacatgccattgtaccatactttttagttgtgggaaatgtcttcacgtctcctttttaaacttttcatcatttgcttcagtcagggaatgaagtctttgaatcagggagttagtcttggaaagctaacccttgaggcaggtggatcttttattatatcacattctgtctttgtgggaactctggtgctcattattattccactctgcttcagtgttatcaaccttgtaggtttccagggctgcacttcacatgtgaaaggggacggttgccatgggagataagacagattgggaagccgtcagagtccctttccactgagggtcaccatgccagactagctgacattgtcgggggcgggggggggggggggccccaaaaacagaagacccacctcctgcaaggctctgaactctcgccatgctctgaactctcgccatgaccaacacagaccttgactctggggtactcccgattcagcttccaagcagctgggattacaggtttgatggggatgtccttctctgtatatgtttctcttattggttgatgaataaaacactgtggccagtagagaggtagggagatagatgggactaggagacaaagagaattctgggaaaggtaggcggagagaagttgccatgtgagccgccaaaggtggtaagataacaccacatggaaatacttagaattacagaaatgggttaataattaagacagagccaataagaagcccaagctaccggccaacagttttataactaatatagtgtctgtgtgtctttgggggtgaaacatctgggagaagctccgcaacacaggtttataccttcaagcctatttgggtatcactttacataaagaagaattgagccaggcatggtagaacacatctataatcccagtagcactcgggaacctgaggcagaacaattgcaagttcaaggtcaacctgacctacctacagatcaagaagaacctgtcttcatttttttttaagaaaaagaataacttaagaactaagtttctttactaccaaacagtaatttaaagggtgactttgaaaaataaaattgaatcttcctattagagtgcaaacagataacggccgtgataatggcctctgttatgaagacattaacatctgcgaggcggtcagtaactggtgctgcagctctaaataaagggcatctcgaaacccttgactgagttggtgtcatcatgcgagaaatggaaatgagggtagttacggccagaaccaagatccccgcctgtgtgcaggaacctgctttgaataaagcagaaaaataacttcagtgactttctgaagtaacagtcctgaagtatgtgaggcttagtctacaaacagaagtgctagcgtatgcttggctgctgatggattcggtccctaggtacttcatttggaggctttggtgtggcaaattcatagatatcgattctttccctttttcaaagatttattttgttattttgtgtatatgagtattctgcctccatgtatgtttgaaaaaaaaaaaacatgtttacttgatatctcagaaggtcagaagaaggcatcagatctcctggaactggagttggagttgtgagctgccatgtgggtgcctggaattgaaaccagatccttttgagtgcagcaagtgctcttaaccgctgtgacattctccagattcaagtttttgacatcactttaatgctacaagaagcattaaaacccttaagtttataggtggagtaattttcacaaagtggataaccatgtaactgacagctggatcaagaatggaagtgccctaacaagaatagcctctgcctgcccctgctacttgtcactcccctagaagtagccaagtgccctggatcctaataccatgggtgagttttgcctggaactaaagactctttaacctgtttctggattcttaggagtttttaaaatgtggcctcttgagatgcagccctgtcagataccgtcttgagactgggtagtaacaaacctagaccacaagctgtctcatcttcaatgcgtttttttccttacatgttcttaatattcttgtcaaataagccttatattttcccttctctatctgaaaacagcccagtgatataaataaggactccaaagacattttacagctgaaaggaatggatacaacagtccaggagtgaggattgttagcccttgagaaaaaggcacagagtgtgacatgaagatacggtccccatgcctctctctcacacaacatggagcatccctgggtaacttcctgggcatctggaggttcccaaagtttgtatcccctgagaaaggaccatggaaagacatcagctggtatttctcccagatgtcggagttggtgaaaacatggtcatgggacgaaatgctttcttccatggtccacatctcaaggtcaccctgatatgccctgctagaatcagaactaacctttagaataaagaaaacttgattgatttaaaattcttagcccaacatatatgaatgtatctcagaacttgtgagcattgatgttttccattttaacacagactggatcttgtataaaaatttcataaggtttgtttttctgtgtttatgagggtttaaagcagcttttgaaatgagagtcttcttttttttagttgtcacctcccctaacttcttacatttggtcttgttcctttctcttggcattgtgtggaaattagggcggctctcgaaagttcatcttgttaagtggctgtagaatctagatccagaatatgtgtggatgtcgtaactcagttctgcagctctccagctctggctccaggagcccaggcctgcatccctcagacagtggctgcagtaactcaggcctgcagctttcagacactggctgcagtagcccaggcctgcagctctcaagacagtggctgcagtaatccgtgtctgcagctctcagacagtggctgcagtaacccgtgtctgcagctctcagacagtggctgcagtaacccatgtctgcatccctcagacagtggctgcagtagcccaggcctgcatccctcagacagtggctgcagtaacccatgtctgcatccctcagacagtggctgcagtaacccatgtctgcatccctcagacagtggctgcagtaacccatgtctgcatccctcagacagtggctgcagtagcccaggcctgcatccctcagacagtggctgcagtaaccgtgtctgcagctctcagacagtggctgcagtaacccgtgtctgcagctctcagacactggctgcagtaacccgtgtctgcagctctcagacactggctgcagtagctaccggcctgcatgctcttggatagaggctgctttcctgctaactgcacattgtcctcgggcttcatggtatttttaataatcctccaaccaaacacagatcctgcctaacatgagaccaagaatagaagcaaaacaacagttgctgccactttgcagataactactgttcaggtgacccaaactcatctagaaaatgttcaggaaagaacattcaaggtctggggttagtaattttctttgcaaatcttaaactgtgaatttcttctggctggtagacgctagagaagcagagagtctttgtagccatctagcaatggtttccagtccacaggcatagcttttgtatgcaaaaatcttgcatctatgaataggtgcctggttgtcagagaagtgtacagaattttttaaacttctaccggagtactgagcatcggctttctgggtatcttatggattaagattctggttatgaaacaacaaagacagccatcagaattaactcggctcttaattctcctccagtagctattgtctttgctcataggattttggattttagtatcgaatggaggggttaggtgtctgtaataaactttgtaggaaaatggaagttctgtagttcatcacccttgtttcacaaatgcttgttcttttccttttcccccccccctgcctctccctaacctacacaagcactcaactctggatgatgactgggagtagtagaagaaaattgaaaaagtctgctgggtgtggtgccacatgatgtaatccctaacttgggtggtagatgcaggaggatcactgcaagttcaaggccagccagagatagagagaccctgtctcaaaacaaagaaaaccaaagagtatgcaaaacagggaaggtagacttgcaggcacaccttgagtagcgaaagggtctgggactcagcactgaaggttggtggtgttaggagcaaagagaagttcattcatggggttcgacagaggcaggtgagggtgagattccagcacttgtggaatcccactctggattgccatcttctcagaagataaagagcttgttaaagagatcttgacaattttaagagaaaacagagaaaccatgaaacatttctctatgacatagtgcccaggatcggaagacagaggacagggagatcattgagcagggtagctaaggtgaatgactgtgaatttacaaagaaacagttcccacttcacttagctgtctgctttccacgggcatacggaggctcatgcagaccaggagaaagtggatttactcacagtttttcccaagtaggtgtagtggagtggagttcagagaatatgggaagaggtcactaaagtaatatatcattgcggtgtaagatggcaaaggagtgaagtaagcatgagagatggaaggggggaaaggagggagaggatggggacagagggacacaaactataaatctgacagatgaagcccataaaacttgatttctgtgaccaaaggtaaattaattatttttattttgttttttgggtttttcttgacagtgtgtgactctctagcacaggctggccagtgagtaaatgattttgagtccctgtttaatcattcaggtcagtaagtggcagtgataactgtcagtgtatcctttgagttaccccttcaagttgctaaaagttagtgttgagaatggcaaataagacgtttctgtgctgtatatgttcacaaattctttaccatggcaaagaactttgacgtgtttatctatacaagcatgttgtttggcttagtgctacgagatattaggactgtgccatcttgacacccagccactccctctttgctgcttgtgtagaagaagtgacaaatctgggcatttgaggttgttatccccattagaatccatactgtgccatatttctggcagatttcccatggcagatccatgttgagaaagagtaaaatcattgtaccaaaacctccgacagatcatgcaagattcactgtgctggttgttttgagtggagaaggaccataactgttttactttgttatccatgtccaaactagaggacaaggtacaatactgttagaccaaaacagaccaaggaatatctacttaggtgacaataaccaaataaaaagaccccttctgaagtgacagccagaggcactggagtagaacccagaatacctgcagctcttcctctcccttgggcctactgtcactctgctgtttaggaaagtctgtttgcatgcagtcgtccccccaccccccactccccacccccaccggccggctggatnnnnnnnnnnnnnnnnnnnnnnnnnnnnnnnnnnnnnnnnnnnnnnnnnnnnnnnnnnnnnnnnnnnnnnnnnnnnnnnnnnnnnnnnnnnnnnnnnnnnnnnnnnnnnnnnnnnnnnnnnnnnnnnnnnnnnnnnnnnnnnnnnnnnnnnnnnnnnnnnnnnnnnnnnnnnnnnnnnnnnnnnnnnnnnnnnnnnnnnnnnnnnnnnnnnnnnnnnnnnnnnnnnnnnnnnnnnnnnnnnnnnnnnnnnnnnnnnnnnnnnnnnnnnnnnnnnnnnnnnnnnnnnnnnnnnnnnnnnnnnnnnnnnnnnnnnnnnnnnnnnnnnnnnnnnnnnnnnnnnnnnnnnnnnnnnnnnnnnnnnnnnnnnnnnnnnnnnnnnnnnnnnnnnnnnnnnnnnnnnnnnnnnnnnnnnnnnnnnnnnnnnnnnnnnnnnnnnnnnnnnnnnnnnnnnnnnnnnnnnnnnnnnnnnnnnnnnnnnnnnnnnnnnnnnnnnnnnnnnnnnnnnnnnnnnnnnnnnnnnnnnnnnnnnnnnnnnnnnnnnnnnnnnnnnnnnnnnnnnnnnnnnnnnnnnnnnnnnnnnnnnnnnnnnnnnnnnnnnnnnnnnnnnnnnnnnnnnnnnnnnnnnnnnnnnnnnnnnnnnnnnnnnnnnnnnnnnnnnnnnnnnnnnnnnnnnnnnnnnnnnnnnnnnnnnnnnnnnnnnnnnnnnnnnnnnnnnnnnnnnnnnnnnnnnnnnnnnnnnnnnnnnnnnnnnnnnnnnnnnnnnnnnnnnnnnnnnnnnnnnnnnnnnnnnnnnnnnnnnnnnnnnnnnnnnnnnnnnnnnnnnnnnnnnnnnnnnnnnnnnnnnnnnnnnnnnnnnnnnnnnnnnnnnnnnnnnnnnnnnnnnnnnnnnnnnnnnnnnnnnnnnnnnnnnnnnnnnnnnnnnnnnnnnnnnnnnnnnnnnnnnnnnnnnnnnnnnnnnnnnnnnnnnnnnnnnnnnnnnnnnnnnnnnnnnnnnnnnnnnnnnnnnnnnnnnnnnnnnnnnnnnnnnnnnnnnnnnnnnnnnnnnnnnnnnnnnnnnnnnnnnnnnnnnnnnnnnnnnnnnnnnnnnnnnnnnnnnnnnnnnnnnnnnnnnnnnnnnnnnnnnnnnnnnnnnnnnnnnnnnnnnnnnnnnnnnnnnnnnnnnnnnnnnnnnnnnnnnnnnnnnnnnnnnnnnnnnnnnnnnnnnnnnnnnnnnnnnnnnnnnnnnnnnnnnnnnnnnnnnnnnnnnnnnnnnnnnnnnnnnnnnnnnnnnnnnnnnnnnnnnnnnnnnnnnnnnnnnnnnnnnnnnnnnnnnnnnnnnnnnnnnnnnnnnnnnnnnnnnnnnnnnnnnnnnnnnnnnnnnnnnnnnnnnnnnnnnnnnnnnnnnnnnnnnnnnnnnnnnnnnnnnnnnnnnnnnnnnnnnnnnnnnnnnnnnnnnnnnnnnnnnnnnnnnnnnnnnnnnnnnnnnnnnnnnnnnnnnnnnnnnnnnnnnnnnnnnnnnnnnnnnnnnnnnnnnnnnnnnnnnnnnnnnnnnnnnnnnnnnnnnnnnnnnnnnnnnnnnnnnnnnnnnnnnnnnnnnnnnnnnnnnnnnnnnnnnnnnnnnnnnnnnnnnnnnnnnnnnnnnnnnnnnnnnnnnnnnnnnnnnnnnnnnnnnnnnnnnnnnnnnnnnnnnnnnnnnnnnnnnnnnnnnnnnnnnnnnnnnnnnnnnnnnnnnnnnnnnnnnnnnnnnnnnnnnnnnnnnnnnnnnnnnnnnnnnnnnnnnnnnnnnnnnnnnnnnnnnnnnnnnnnnnnnnnnnnnnnnnnnnnnnnnnnnnnnnnnnnnnnnnnnnnnnnnnnnnnnnnnnnnnnnnnnnnnnnnnnnnnnnnnnnnnnnnnnnnnnnnnnnnnnnnnnnnnnnnnnnnnnnnnnnnnnnnnnnnnnnnnnnnnnnnnnnnnnnnnnnnnnnnnnnnnnnnnnnnnnnnnnnnnnnnnnnnnnnnnnnnnnnnnnnnnnnnnnnnnnnnnnnnnnnnnnnnnnnnnnnnnnnnnnnnnnnnnnnnnnnnnnnnnnnnnnnnnnnnnnnnnnnnnnnnnnnnnnnnnnnnnnnnnnnnnnnnnnnnnnnnnnnnnnnnnnnnnnnnnnnnnnnnnnnnnnnnnnnnnnnnnnnnnnnnnnnnnnnnnnnnnnnnnnnnnnnnnnnnnnnnnnnnnnnnnnnnnnnnnnnnnnnnnnnnnnnnnnnnnnnnnnnnnnnnnnnnnnnnnnnnnnnnnnnnnnnnnnnnnnnnnnnnnnnnnnnnnnnnnnnnnnnnnnnnnnnnnnnnnnnnnnnnnnnnnnnnnnnnnnnnnnnnnnnnnnnnnnnnnnnnnnnnnnnnnnnnnnnnnnnnnnnnnnnnnnnnnnnnnnnnnnnnnnnnnnnnnnnnnnnnnnnnnnnnnnnnnnnnnnnnnnnnnnnnnnnnnnnnnnnnnnnnnnnnnnnnnnnnnnnnnnnnnnnnnnnnnnnnnnnnnnnnnnnnnnnnnnnnnnnnnnnnnnnnnnnnnnnnnnnnnnnnnnnnnnnnnnnnnnnnnnnnnnnnnnnnnnnnnnnnnnnnnnnnnnnnnnnnnnnnnnnnnnnnnnnnnnnnnnnnnnnnnnnnnnnnnnnnnnnnnnnnnnnnnnnnnnnnnnnnnnnnnnnnnnnnnnnnnnnnnnnnnnnnnnnnnnnnnnnnnnnnnnnnnnnnnnnnnnnnnnnnnnnnnnnnnnnnnnnnnnnnnnnnnnnnnnnnnnnnnnnnnnnnnnnnnnnnnnnnnnnnnnnnnnnnnnnnnnnnnnnnnnnnnnnnnnnnnnnnnnnnnnnnnnnnnnnnnnnnnnnnnnnnnnnnnnnnnnnnnnnnnnnnnnnnnnnnnnnnnnnnnnnnnnnnnnnnnnnnnnnnnnnnnnnnnnnnnnnnnnnnnnnnnnnnnnnnnnnnnnnnnnnnnnnnnnnnnnnnnnnnnnnnnnnnnnnnnnnnnnnnnnnnnnnnnnnnnnnnnnnnnnnnnnnnnnnnnnnnnnnnnnnnnnnnnnnnnnnnnnnnnnnnnnnnnnnnnnnnnnnnnnnnnnnnnnnnnnnnnnnnnnnnnnnnnnnnnnnnnnnnnnnnnnnnnnnnnnnnnnnnnnnnnnnnnnnnnnnnnnnnnnnnnnnnnnnnnnnnnnnnnnnnnnnnnnnnnnnnnnnnnnnnnnnnnnnnnnnnnnnnnnnnnnnnnnnnnnnnnnnnnnnnnnnnnnnnnnnnnnnnnnnnnnnnnnnnnnnnnnnnnnnnnnnnnnnnnnnnnnnnnnnnnnnnnnnnnnnnnnnnnnnnnnnnnnnnnnnnnnnnnnnnnnnnnnnnnnnnnnnnnnnnnnnnnnnnnnnnnnnnnnnnnnnnnnnnnnnnnnnnnnnnnnnnnnnnnnnnnnnnnnnnnnnnnnnnnnnnnnnnnnnnnnnnnnnnnnnnnnnnnnnnnnnnnnnnnnnnnnnnnnnnnnnnnnnnnnnnnnnnnnnnnnnnnnnnnnnnnnnnnnnnnnnnnnnnnnnnnnnnnnnnnnnnnnnnnnnnnnnnnnnnnnnnnnnnnnnnnnnnnnnnnnnnnnnnnnnnnnnnnnnnnnnnnnnnnnnnnnnnnnnnnnnnnnnnnnnnnnnnnnnnnnnnnnnnnnnnnnnnnnnnnnnnnnnnnnnnnnnnnnnnnnnnnnnnnnnnnnnnnnnnnnnnnnnnnnnnnnnnnnnnnnnnnnnnnnnnnnnnnnnnnnnnnnnnnnnnnnnnnnnnnnnnnnnnnnnnnnnnnnnnnnnnnnnnnnnnnnnnnnnnnnnnnnnnnnnnnnnnnnnnnnnnnnnnnnnnnnnnnnnnnnnnnnnnnnnnnnnnnnnnnnnnnnnnnnnnnnnnnnnnnnnnnnnnnnnnnnnnnnnnnnnnnnnnnnnnnnnnnnnnnnnnnnnnnnnnnnnnnnnnnnnnnnnnnnnnnnnnnnnnnnnnnnnnnnnnnnnnnnnnnnnnnnnnnnnnnnnnnnnnnnnnnnnnnnnnnnnnnnnnnnnnnnnnnnnnnnnnnnnnnnnnnnnnnnnnnnnnnnnnnnnnnnnnnnnnnnnnnnnnnnnnnnnnnnnnnnnnnnnnnnnnnnnnnnnnnnnnnnnnnnnnnnnnnnnnnnnnnnnnnnnnnnnnnnnnnnnnnnnnnnnnnnnnnnnnnnnnnnnnnnnnnnnnnnnnnnnnnnnnnnnnnnnnnnnnnnnnnnnnnnnnnnnnnnnnnnnnnnnnnnnnnnnnnnnnnnnnnnnnnnnnnnnnnnnnnnnnnnnnnnnnnnnnnnnnnnnnnnnnnnnnnnnnnnnnnnnnnnnnnnnnnnnnnnnnnnnnnnnnnnnnnnnnnnnnnnnnnnnnnnnnnnnnnnnnnnnnnnnnnnnnnnnnnnnnnnnnnnnnnnnnnnnnnnnnnnnnnnnnnnnnnnnnnnnnnnnnnnnnnnnnnnnnnnnnnnnnnnnnnnnnnnnnnnnnnnnnnnnnnnnnnnnnnnnnnnnnnnnnnnnnnnnnnnnnnnnnnnnnnnnnnnnnnnnnnnnnnnnnnnnnnnnnnnnnnnnnnnnnnnnnnnnnnnnnnnnnnnnnnnnnnnnnnnnnnnnnnnnnnnnnnnnnnnnnnnnnnnnnnnnnnnnnnnnnnnnnnnnnnnnnnnnnnnnnnnnnnnnnnnnnnnnnnnnnnnnnnnnnnnnnnnnnnnnnnnnnnnnnnnnnnnnnnnnnnnnnnnnnnnnnnnnnnnnnnnnnnnnnnnnnnnnnnnnnnnnnnnnnnnnnnnnnnnnnnnnnnnnnnnnnnnnnnnnnnnnnnnnnnnnnnnnnnnnnnnnnnnnnnnnnnnnnnnnnnnnnnnnnnnnnnnnnnnnnnnnnnnnnnnnnnnnnnnnnnnnnnnnnnnnnnnnnnnnnnnnnnnnnnnnnnnnnnnnnnnnnnnnnnnnnnnnnnnnnnnnnnnnnnnnnnnnnnnnnnnnnnnnnnnnnnnnnnnnnnnnnnnnnnnnnnnnnnnnnnnnnnnnnnnnnnnnnnnnnnnnnnnnnnnnnnnnnnnnnnnnnnnnnnnnnnnnnnnnnnnnnnnnnnnnnnnnnnnnnnnnnnnnnnnnnnnnnnnnnnnnnnnnnnnnnnnnnnnnnnnnnnnnnnnnnnnnnnnnnnnnnnnnnnnnnnnnnnnnnnnnnnnnnnnnnnnnnnnnnnnnnnnnnnnnnnnnnnnnnnnnnnnnnnnnnnnnnnnnnnnnnnnnnnnnnnnnnnnnnnnnnnnnnnnnnnnnnnnnnnnnnnnnnnnnnnnnnnnnnnnnnnnnnnnnnnnnnnnnnnnnnnnnnnnnnnnnnnnnnnnnnnnnnnnnnnnnnnnnnnnnnnnnnnnnnnnnnnnnnnnnnnnnnnnnnnnnnnnnnnnnnnnnnnnnnnnnnnnnnnnnnnnnnnnnnnnnnnnnnnnnnnnnnnnnnnnnnnnnnnnnnnnnnnnnnnnnnnnnnnnnnnnnnnnnnnnnnnnnnnnnnnnnnnnnnnnnnnnnnnnnnnnnnnnnnnnnnnnnnnnnnnnnnnnnnnnnnnnnnnnnnnnnnnnnnnnnnnnnnnnnnnnnnnnnnnnnnnnnnnnnnnnnnnnnnnnnnnnnnnnnnnnnnnnnnnnnnnnnnnnnnnnnnnnnnnnnnnnnnnnnnnnnnnnnnnnnnnnnnnnnnnnnnnnnnnnnnnnnnnnnnnnnnnnnnnnnnnnnnnnnnnnnnnnnnnnnnnnnnnnnnnnnnnnnnnnnnnnnnnnnnnnnnnnnnnnnnnnnnnnnnnnnnnnnnnnnnnnnnnnnnnnnnnnnnnnnnnnnnnnnnnnnnnnnnnnnnnnnnnnnnnnnnnnnnnnnnnnnnnnnnnnnnnnnnnnnnnnnnnnnnnnnnnnnnnnnnnnnnnnnnnnnnnnnnnnnnnnnnnnnnnnnnnnnnnnnnnnnnnnnnnnnnnnnnnnnnnnnnnnnnnnnnnnnnnnnnnnnnnnnnnnnnnnnnnnnnnnnnnnnnnnnnnnnnnnnnnnnnnnnnnnnnnnnnnnnnnnnnnnnnnnnnnnnnnnnnnnnnnnnnnnnnnnnnnnnnnnnnnnnnnnnnnnnnnnnnnnnnnnnnnnnnnnnnnnnnnnnnnnnnnnnnnnnnnnnnnnnnnnnnnnnnnnnnnnnnnnnnnnnnnnnnnnnnnnnnnnnnnnnnnnnnnnnnnnnnnnnncatgagctgaacatgctcatgaacgagctaaccctgcattcgaagaggaggagcccttcctgtgagggtatggatgcgtctgcatgcaaaacagtaaaggaggcttatcctatagttaaaaggggtgaagtgctccatcagaaaactctcaattctgataaatgcttttagaaaagtagcagttacaaagtcaatacacggaatcagtggctttctgcctacatactacttacaaacatgccaagaggagatcagaacaatcctattcacaacagcattagaaaaaaaaaaccaacaataacacaaaacctcagaataaacaaacaaggaaaatattttaacaagaaaacagcctgagatgttgattatactagtctggtatttgttttgttgttgttgttgttattgttttttgtggtaatctagaaatgtcttaaaataagtttggtaaatgtaagaagggccagtgtttatcagtatattcttcatgagattgagataaaacagttgggttacatattttaatgtaatgtgaaacatgagcctacatattcttggttactcaactcctatctataaagaacagtgaattggggtctagtcatgtgtttataccgattcttggcatatgatcaagcagttcaagattggtcttcattaacaagcaagatcactaagtggtaacattctaaataatacttttaattctgtatacaaagaacagagattgtttccaaatgctgattcaagtggatgataaggaaagaatcaataagcagaaagaaagccacgaagaaggttgtaagtaccatactttggatgaggaaggaccacgtgctaaagggaccacgtgctaaagggagacttttgtctggaagtagaatgaccaaaagacagggcaacactgaatgttcatcaaggtgaaggtacttctgagagctgccttcatgcccctcatgcttctagtatccagagcttctgagtgtgggtctagaatctcaccttcctcaaccatggaaatggctttgaagtggttcaagagcagggatgtggctgctctggaaaatgaaaaaaatgaggtgcccccttgggtgtcaccctttagcacattccaggtaactgtgatgaggaaagaaaaagagactatcataggtgagtgccccaaggccctagcatgaggtcccccagtcatcagcagcaacactggaaaaggaattctccaagtccccaggatggggagggagcaggtatatatgacttctaacagtttcttctgtagaaaatgaagattgacagccaaaggtctgtctggttcactttaacacagtcctgatttttttccaagaagtcctttttgatatatctaaagagaaagatgggatttttactcaatactggagccacatactctgtgttcactgttaaaaaggtatcctatgcaggtgtgtgtgtgggagacttatggttcctccagccactgatgcaggctgagaggtttcagaacactcacttctggtgttctgaatgccctagtccactagcaggaagaaacctattagagaaaccatgagcgactgtaactttccagtgggatagtgaggaaactttgctaaccgtcgtcatttcattcctgggacaaaatacctgagatgaacaggaaagaaggaaaaagaattgattttgactctcggttttagaggtctcagttcagggtcatattgggcgtgtggtggatccttgcatgagggcaaagtggcaggaccaacctctcatttcttctgtaaggttgcacctcctaaatggtcccaccatctcctgtgtgcccaagcatgcgtgcatgtgtgtggtgtgtgtgtggtgtgtgtgtgtgtgtgtgtgtgtgtgtgtgtgtgtgctgtgattaggagggagtgtcccagggcgaggcttatctgttgcacttgaacgtgctggtccctgagatatccccaaatgtaggaaacacgactgtatggtttgtgatagtggaaggtgggggctgcactagagttctccccttaaaaaataaaaataaatcttaaaagaaaaaaaagacattccctccaggttaacattttttatatggcttcttaatcagttgatagttaatggacttcccatacaattatctacttactattttctctctgctcacacaggcatcacgagacattaagtgtttcactcaagtcggaattcattaacgttatcttgtttcccctagccacctcataattaaatcttctaaaaatgaaattaggttaatttaatgtggcatgttaaggatcttgtgctggctgctcacgaccactgagttcttctggtaccagaaaaccatctgcctaaactttgctcttacattttgcttaagtttacttttatctaacacctacttatgatccattgtaaacatcagttggtttaatccactttgagtattatattacattataatctcaaaaacattatgtaaaattatgtaaaggaaatccaaggcagaggaggttcaggaatgtgcccaaggccacagattttgaaaagtggcagagattatgaatcatggttggctcagcagagtggctgagtcaacccacagactgctttgcactgtaggggaagggtgctctgcccataggaacagggacagtggggacctggccctctgagaccagcctacagcacactgatgaaagttaaggtaagacctgaggttctgacaccactggggaaccatggaagagctgtcaaggtgttgacacagctggctgttttttgactgttcccctagatacacacaaaatggcaaaaactgacaaatggaattatacaaaactggctggagggttctcatcccgctcgccagttccccattaaccaattaattatcattgtttggccattggttcaggcatattactaactagctctcacaactaaattaaccccttcctaatatcctgtattttaccatgaggctcgtgtcttgttacctcacatcttgcttccctggcggctacatggagtctccctgactttgccttctttctctctgtatctttgtttggatttcctgcctggctttattctgcttggccattggccaaatcagctttattcatcaaccagtaaaagcaacacatattcgcaccatacagaaggatcccccatattacaaaactaatgttaaaaaaaccttatgtacaacaaagaaaataatcaacagagcaaaaagatggcataatgaaagagaatgtctgttgatattacctgatgaaaagttaatctgtagaatacataattccaaataaactgtaaaaataaaaaaaaatccaagtgaaacaatgaaaatggatcaatggccaggtgtggtggtacaaacccacactatcactttgaaaacagaatcagaaagattgtcatgactttgagggcagcctgtactacacagcaagttccaatcctaccaggtacccgtttcagactaaatataacactttaccatatttatttctggtatcaagtctagacttggtttgtaaattctgcactgttttaaagattcacccaaagagcttatgggattttgtgtttcctgttgtggagtattttgtatttgttctctgtggttctgtaatgggtatttacaatcacagattcctcagtctagtggttcatgattaaatcattttctcttatcatgtttgcatcttagaattacataagggctttaaatatgccccagatatttacacctaatcacagccatctcagaaacaatgctttagtatatgcccagaaaaatagttgagtctaagtactctgatgtcttcagttctctgaggctgacttacccacagcagggaaccctaatcacagcttctcagcagcaatgtgcacagctcctttttctctatattctttgctttcaatcttttgctaatttagagactataaaatggtagtttgcatctgtattctattttgttggctagcttttcttctcttcagccaaaccactctatcaattcattttatattttcttgtttaaatccttctactttatctttgcctttttaatgtttagaatatttcattcgaatatgttattacacacatacacacacacacacacacacacacacacacaccacggctttctgtgtagcacttctttcttcctggggatggggtaggatcccttctgaaatgggcatcttatgagttactaacaggaaaggttggtggaagaattacactgtagttggctcccatcagaaaggtggcagaccatcagtttctgtgacttaccttggagaatatatatatatatatatatatatctaaaatttgattacacagctacaattttgctaaaaccattatgccctgcttacaatgggtttgttttagaggtatgaaattttaattcaaattttgaaacagttatggagcttttattagcagattttttttttctggacgagaagaatctacctactatagctctgatatttccaggcaataaaattttcacaatagaactgttatgtctaggaagcaaactgtcttttgttacttcgttaaattggtttggatatattaagcagcgctgttcaagaattcaggacatctgattgctcagttctcatgtctccaattcttttattcttctcaaagttcccacaaaggattagtggcagagaaggagggtggctgatacagtgttggacagcagttctcttaccaaactaaggacatcaggtcagcgtgcacagtaactgtgcttagtgacacagatgagcaggcagctggataaggtgggaagaagttgccatgttgcccctctccaggccccacacagcctcccacagagatacctttcacttaagggagcaagacagacttgggttcagatttctaacagtgagaccagagatacggagagctctgtggtccctgcgtctaggccactccagcagactgagttggttaactacttttggaagatgcttttggttcccccacttcctgaaacctctgccggcaaagcagggctcaaacctctagcagtggcacacggaacacagaaactggtgcagggatttaccctggagcccatgccacagggagcctgggcccctgggaggaacaggagacccggtgtgcaggtcagagctcccagatggagcctgtagcctggctctgacgtcaggcagaggcctgtgtgctggttcagctttggggtagagcggacacacacttctcttctggaacaggaccagtcctgggactgtaagaccctggtgcctcccctccgggtggtttccctcaaagccagtctcctaactcaggtagcacagttatcaacagtgcttatgcttcaggctttcaaacttctctgtcgtcagaccttgtcccagtgagacagacttgttttggccacagccagctgtggtgcgaccccagtgcgtccctaagattaagcaggtacttatggcagtgagactcaggaatgacccagcttaaccctagcataggtggctaagggggtcttcagtgctgctgtccccaccttggatagaacagtatcatgtgaggcccgtttgttggtgttggggcaaggttgcaagcatgagactttgccttgtaacttagtgctgtgttgataaatgggaagaccctggagacacccccaacccccagatctgtctaccaataaggcctctggaacagcagcagactcagggagggcagcccccccacccagtctgttggactaccaggccagctacttcagcctgtgtctatttaccatggccacggcccacaaatcctccttagcagagtctgctactacagcagtatagtaacttggtcctaactcaaccattgtactgctcctgtcaggctgtgggctcagtggatcacacagctgggtggaataggtggttacatatgtgacacaggagtcagaggtgggtctacccatggtgagcctgcccagaggagggcagagttcagcagcctatccgcaggccagtgactgtggaagaggcatctaaccctaacccggtaccagggagaatcctgcatcatccctaggaggcaggctatttctagatctccaatttctttttcattaacactccaagactgattggaacaaacgtgggcttagatttccatctaaaacttccaaaacgagacccccaaagcacagccccagcaaatctgcagcaagctcaaaggaaaccagcctcactggggacagtcaggctcagtggaaatcagactagagtaaacaccttacccttgggtgctcacatgtcacactagcttgcaccaagggctttcaggggactttagggaactctgagctcatgtaggactcaggcagtaacctgcacaggggtcttagtgagaagttgaaattaccattttaggaagatttgatgagcttaagggaacagaaactcctaacagaggaactcatcaagctgaaagcaaattaaaaagttcccaaggtaaaaaatattctctgtgaaattgagactctcacagaaggcatcaaaagtaggtgaattgaatagcatcagtgagcttcaagatgagcttcttaaaatgcactgttggagataaaagaaatgagaaagggaaaaaagcttatgggaaaattacgaactactgaaggaacaagtatgctattggggtgcaagaaggacccgtgaatgccaaagaagaagaaagcctattcccagaaatagtaacgggaaagttcacaaaccaggagaacagaaaaatcctggtatacgaaaggcaagagtcaccagtcaagcttaaatcaacaaagtctacctcacaatggtataatcaagcaaactctcacagctgaaagaagagccccaaggctataagaaacaagaaagaacacaggggagacaaaattctcctaacagtgcacttctcagcagagacatatgggctgggagtgttgtgaggttttcatggtaatggagagaaagagaatacctgtcagcggtccccaaccaagctattctgtaaaaaacgaacagataatgacattcccagattaaagctgagtgtctgtctagacctgctgtagaagtaatgctaaaggaagttctaagaaagcacaggacagctatactcctagcacccaggagatggaagcagcatcagtgtcaggagttcaaggttacacagagcaagttcaacgccagcatggcctacaagaaatcatgtcaaagaggacagagaatcggggagataaaggagggagaggaagaggaagaaaaggagaaaaaacactagtttgtaaaatagggtgagagtgaactatgaaacacactcaggacactatagtattgtaagcatggagcagacaacattcaaatttttagtataaacaacaacagaaaaccaaaaccccaaacaaacagatgatgggacctagctggacaatgtactcatataaattcagattttcaagctccaaagtaatggagcacatggaaaaaggatgaagtgcataatctacaatgtttgaaaatgtataggcagctaagtatggtggctcacatctgtaacgccagcacttgggaggctgagacagaacaacttccccaagttcagggtcagcccaggatataggtcaagtctgtcttagcaagcaaaagctagctggtacaaaatttgagtagaaaatttgcaatcatctatacttgaagcacataatgaggacgactctggtggatagcctagaagctgggcaggatttcatgaacaaattgactgcgggcattggcaactagggagagaaaggaaacacagactaattcaatcaaatttgaggctggtggtgattatttttctatatcgagagaaggaatagatttggggtaggaataaaacataaaatccacttgagatatatgggggcctttgtatagtaaaaaaaaaaatcagtttcccttacttttgttatttacttgctaaagttcatacccaaaccacagaagtaaaaagatgccgtgaaaatatacatttccacgggatacgggttcttttgaaccagctgttcatcccacactaaaactagtgtccaataagtgaaacataatgggatgaattttctcaaaagcagatttttttttttccagatacagcaccatcagttgtatggaaattaacctataaaatcaggcagtgtacctcagtgcagcttaacttgtatcaggccccaagtttcatcccaagtaccaaacacaacaaaacaagcaagaaaactgattgattaacaagtttcactctttggggaaaattaactttaatgtccatgtgagctttgagaattgtggctttctaaaaatagtaggatcaaattagttagttttgctatattgtgaaagctaactctcaggggacagttattacccgaaaagaaacttactctggagacgaaggatcaggtgtgtaactatgtgaacaacagcccagcctctgtccaagtaagagtctgtacaagacctggggttagggaaaagggtcaagggatatgtctacccatgtctttatggctaagattatagctaagatagaggtgcacagcagacatgtattgactcaaggcggtgttaggaccatttcacagcggagggaaaggaggtacaaagaaacgaaatacgctccaagtcacacgctgtcacaagacgtcagacgggatttttcaggctgggaaaccctggctttcagagactgtgcttacacccgttcaactctgctccttcaacaagtcagccggggacctttcaattaactggagtgatcttcaaagtctggaaaaatttaaagttgccgccagagggcatggatctgcccttggttccgggggcgtaggagatttcctttcccagttaaaggcgctcacagagtaaagacactggtgatgtgagcggttggagatacaggcgctcacagagtaaagacactggtgatgtgagcggttggagatacaggcgctcacagagtaaagacactggtgatgtgagcggttggtgtgtacattttgtactgcggtcgaggtttccccgcctgcttcgcttttggcagctcttaactgctccttaccccgctcttgaaactaaaaccccttacctactgagcaagagaaccacgggtcattattattattattattttgcaacagccgtgtgaggatccagcgcgaaaggacgagcgtttggggcggcgcgccccgggcacacgcgcgtcgtcacagacaggccgtggcggacgggtgggcgagcgtcgcgatgggagctggcgtgggcagggacaggaggagacgaagcgtctcgtttcccgtacggcccaccatttagggaaaaccgcccaccacacggcaccggctgcttaacccccgaaccgaacccccggcccggcccggccaggggcggctgaggcgtcggcgacgaaagcgccaaccactactcggccgtgtgaacgaaccacagtgcggccggggcctggcggggaccgtggtctcctcccgccgtcggacggaaggcgaaacaaacgtctccctccttcccgggaaaacggacgagcctctcgggggcgctccccgcggccggggcagccgggccccccccctccgccgcttgatggcgtcacacaccaccgacgcgggaagcatcgcgaggtctccgggcccgcccctcccctctggaatcagctgtgagtgtgagagcgccgtgtgtgtgcgcgtgtgcgcgcgcgcgcgcgcgtgtgtgtcgcctctgttctcgcgatattcccgtggacgccgggctcgggcgccccaggggcttctgggaaacatggcggtcggctgggaccgtagcactaggtaggactnnnnnnnnnnnnnnnnnnnnnnnnnnnnnnnnnnnnnnnnnnnnnnnnnnnnnnnnnnnnnnnnnnnnnnnnnnnnnnnnnnnnnnnnnnnnnnnnnnnnnnnnnnnnnnnnnnnnnnnnnnnnnnnnnnnnnnnnnnnnnnnnnnnnnnnnnnnnnnnnnnnnnnnnnnnnnnnnnnnnnnnnnnnnnnnnnnnnnnnnnnnnnnnnnnnnnnnnnnnnnnnnnnnnnnnnnnnnnnnnnnnnnnnnnnnnnnnnnnnnnnnnnnnnnnnnnnnnnnnnnnnnnnnnngcgcgaacggttccgctgctgctcggccaccccgtgtgcgtccgtggacgggcgtccgtctcctcccggggacctggcgtgcgtgcgtgcgtgcgtgtgggaggcgatcggtgtgcgcgcgggccggtaacagctgccccggtgtagcggggagcgatgaaaggccgtgtaatttaaaagattacaaaatgaggctttgttcacgggctggcagcagccgtggtgccgaatttgggctccttcccgcctctcccggcgtgggttcctgcagaaacgggtcggctggtttgcccaccttgtctgtcagtcgcctcaagttgttactgcggccccactcggtggaggaagaccccggccagtagaaagaagccccgtgtttgttttttgtttttttttggtttttttggagtgagggttgggaggtttctctctgatagtaaaccccaccacgtacatgaacagagtatgtatgtcggggtccaccttgcagaagccaggcaagcatggcaaggtaagaagagaggtctctctgaaaggaagtcattgcagtttactgcaagagcgacggagacttaggaaaaaaaaataagtttatcttcaccggggttagtcgtttcaatgataattcattaaaaaaaaaaagttggtttttagacttggtgtgttacaaattctacttaatagtctgtctggagtttagttctgttttaacgccaaagagcttatccttggacttcggcgccctagttgcctcaccagtaaaatgagaatgataaggtggtacttacctcatagaaggttgggaagagtacatgtttcagatcgcccaagtgtttagaacagtgcctgccatactgcgcttcgtctgactgtgtttggacttctgaagtttcgtgcggcttggctacttaggcactgaagagatcgtttaaaaattagtttctaacccctcaaattgattaaacacttgaaggctatggttagtaggaacgtttgtctttctgcttctccatgcagtcttgtttatatcagtaatgctccccacacttctctgttagctccttgtcttgcatgtgcacttcaccttttctgttttgtatctccttattttcatctaaagaacttcgtttgagtagctgctgttgtccttacttcccgttgctggaaagcacttccagactcttgttggaatgacacttgttggtggtctcttccttttaactatcagtttgtggtattatccactaactcgggtacacccaaacttcctcacatcctgattagaaatacatctatcttttctgaaaattacatttattaaatagctcactttattttgattggtaacaagggtagccctcatggaaggaattctgagaagttgatgatcttaaaatttgtaacaactagtaagttcccagaagagagtttggtttgtgtggttgcttggttggtctgttgtttgtttctcagatcacaaaacttgtacagcatattatcttcccagtgaactttttattcctaagaaatttatggaattaaatctgtttaccataaaccaggaagcttaaaacagtggaaattgactgttttcagttttcaagactcaaatgaagatgtgggaagggtctagcttcatctgaaggtttggaatggaattcgtccttgctgtcctggcttctgaacaatccctgtaaacacatcactctacactctgacacccctccctctctgtggggactcacttctccatgtggtcttgagagggcgtcagtctttgttttagttcaccctaatccactatgttttcagctaagtgtttttccatttacaagtacccaggcctaggacttcagcacctctctttgaaaacaaagttcattccacaatgcagtggtatgctaatcacttagctatttctcattgagaagtgcacattataaatagcaggagactgagtaacattgataatagaagataaattcttgttgccagtgaggtagctcatctgacacggggcctgatgcttgccaggacccacaccatagatggagaggactggtcctacagattactttctaacgtctacattgttccatgacacagttccccctttgtaatgaatgtaattacacaggaggtttcatttcaaactaaattctttgtttacatacgtaataaacttaattgatcaggctgtatagtttcttgagtcctatattttattctaatattaatatggatacaatgatgaagtaggctatacattgctgtcaggagtgttggtgtctatttcagcatgaagagttttgttgtttctttagcagttgttcaagtattgtcttagttgctatcaccatatccttgaggtttaatttttgtttctttgtttaaaggacaatttaggggagacatcaaagaaaccatatgtggtattagagatctctaaagtgtacacacattgtctaccagtgaacagaaacatcgtgcagagattcccaagtctttagactttgtgaaacgataagaaatatatacaggagtaatgctagtgaaggctgggtttgtagatgcaaatagataaaagtcacagtgttaattttactaaataaggataacctatgtgatgggaatgtcttttgtacatacgcttctctggttgatgaattaaacactgattggccaggcaggatggtaggtgacgctaggagactaagagaatgctggaaaccataggcagagggggtagtcatgtgagcccaggaagaggggactggagtcaggcgttctccagttagataagactttgtagaaatagagattagtagttacgggttaataagacagggctagccaataagaagccctcgtctttggccagcagtttcataattaatatagtgtctgtgtttatttggggcaaggcggctatgggattaggctagggggaaagagtgctcataacacctgtgttatttattgtatcttttatttttattttatgtgtatgggtgtttagcctccatgcatgcatattccacatcagatgatggtggagtggggggagacaagtattgactgatccaggtacagaagccacgggaaagttatgaatgcacttagatgtccatagatgttggctacaagccctgaagtcaggggcgctggaatttggaacagactttggagacaggctgcttgagactaaacccctgttctacatagtacacttgcatcttctggggaaataaatataagaaataaaagtggcatctgtggtatagaagaataagttaatatgttaagtgtattgaatagtatctagcatgaaagttgttctgtatgtcttaactgctattattaggggaagatagacttcaaagagaagagattcagagcatgacttttttaccctttgagtgttaggaatgaagtattgcatgagagtaacaacaccaggaagtaggatttcataaagttcaggttgatttttttattttttaaacaattggataacttgtgcatgtcccaacggtggctgtacagtggcatgtgttggaatggatttcttgggagtagttagtgagcttgcaggaatgggacagaagtagagtggtggcctgcttccttctaaaatggtaatcttagaaaacagtctcggagcaggcctgagactggtaggcaggtggacttcactgtctggctccaggaggggaaatgcataggttgtatttgttctttgtgtttgtgagaccaacagctacttgctgtagatccattgaataaaagaaactataaagcttactatgaaaatgtacttaagttttgcaagtggactccctgtttatttttccagtaaaattttttacacaactactgtttagagctggtaattctctctagtgaacaaaatcattccccatggatagtgtttttaagtgttcctttacccatacatgacagtttgggtttgcagtgctactgagggtgtttctcttccttcccttaatacttacttacctgcctgctgtgccaggcattggtgctacaaaggtgaactcagacatggttccttccttgactgtcctgaggagaaaatagaatctgcaatcagtggctagaaacagttgtaggcacacaaggcccagaagagtcagtggagtcagtcacatgaaagcttgggggaggacaaggaacttgttgtgcagagagagcacggttttcagtgttgctggaactcagactgtaagacggtgggtttggtggacttggtttgtgaaggattctgaagccattttaggatagtctaaatactatgttacgggaagtgacttgggctttgagagagataatatgcaatatgatggtcgttaataattggttaatggccggaagggaatcgagttgaagcagtccagcagcaaatcgtagccattgagactaaggtcctagtaagggacttctctgcccccaggaagaaagcaactagagaaacttaggaaggggttaagtctgaaggtgtaacttatgtttctggcttgtacagtttgctgtgtactgttaatcattaagacatgaaagtggaaggaaaccaggggtgaagtatttcagtgttggacctctgggaaagaaatgcatatagtagaagtcaaggagatattcttctgaggcatcacagctgaaaacaaagattgggaggaatccaagtctagatggaaaatgagacccgggaatcatttgggaaaatgagcatcatgtccactttcaaaatcttgggttttgaagcagtttggcttttcggcttttgattttgagatttgggtacttgctgagtttcttaggtcaaggcaagagactgtttgataaggaagacctctttttttttacacatgcgtgcatgcacacatacacacacacacacacacacacacacacacacacacacacacacgcacgcacgcacgcacgggtgaggaatgagaatttgaatataaatacattctagacaaagctacagaatgaagtttttctcttggacttagtaccacagaagagacaaccttgagccagttcggtgaggagatgggaagggatgagatgaagggttgggctgtaggtgtgctatcagaaatctgtacttaagacttggactgagtttaaagagacgtgaacattttaaatatttaataagaggcctatcaagatggctcagtcaagtgcttgctgcacaaacctgaagagtttagatccttagtgcccatgacaaaagctatgtgtggtggcatgcagctctaaccctgcagtgaggaggcagatgagggggtgtctggggcttcttggtcatccagtctatctggattgattagccccaggttcagtgggaggagacctgtctcaggaagtggagaggttgaggacagtgcttagcattgacctctgactcccgtgcacatgtgcatatgcactagcatgggcggatgcacgcatgcactccatccacacacaggcacataacgtctcagtcacacaagggactgacaggtcagtctcaggtttctgcttaggttttggaagtggtctagaggtgatttaaaagtgatgtgctgggatcattgcaagtctccatcttaggaaatggcttgagcactgtgtattttcttgctgtctgtgtaaccaagacgctgagaagcacctgtgttgtgaaacttattaatatatgagaacttagtcacagcttatgttgccttataacttttttccatatatatgtataatttgtcaacttaatacaaagtaaaattttaactttttaagtgttaaaaatgtgacagtttctcacttttgattttctatttaacgtgtgtttgtatattgcctttcattcttgattttttctgagtgggaacagattaaagagtaaaatgggcttttttttttttggtcaacaagagatgggaatgctaatttctgagaaaactggtcatatattcatttatctgtttgtcccttagcatgactatatgaagggagaggaaggtttctctgaagatgaggcgactgaatcggaaaaaaaccttaagtttggtgaaagagttagacgcctttcccaaggttcctgacagctatgtggagacatcagccagtgggggaacaggtgagcttgcttcagactgccttaggcatcatgcacgacacatgggcgctggccatgaggatgagctcatgctggatcttagagtggctttgtaactgctcatcctgtgccaaattgctctgcttttattatctttattctctgtagcctttggcagtgcctctgtgccactagcagtatttattaaatcttaatgagcaagtagtacagtttacaccgtggtgttattgtgcatataatattatacaatatgttgtatattatattataatgctgacacagctctgttcctattctgggttggatagcaagtaaagacttgctatgataaagtcctcagaatggagtgagagctagctcagtttcatctgccttagttcttctgtgaaatgaggatgttagcatttatgtggctagagttaatgtattaatgatgtaacttttctgtaagtgcttagagcaacacttggtacaaatactttactttgttaagtaaagtaagtgatagaatatgtaaaagaaatctgaacctataatgatgcttcctaatatttttcccctatggtgaattagcaagtaaccccttcatacgcttttgcaacgtcattggattaaaaaaaaaaaaaatgtgtaatacatacaacccagttgttactgctggcctagcacgtgtggagcccaggctttgaatccagcatcacgtaaactgggcagggtgacacatgcctgcaatcccaacactggggaggtggatgcaggagggtctcaacttgtagatcactcttggttacgtagccagttataggctagcctgaactacttgagactctgacgcaaaacaaaacaaagcaaaacaaaacaacccctagtgaataaagtgcaataaaatggcttgctgctcccaacccctgagagtgaagagagtgccgattcttgttgcacagcctgccgtgtatcttgtattatttagtaaattcttttgactgggattctatttaatatgctatgtagtaatatattcaggatattgcaaagtacatgaaaatattttaggggcttggagagcttttgattttctggctcacagatattgtggcatctcaggacctcttttgtttgttttaagttgcattataagcatatgtgtatttcttaataaagagggaagtgtttttaaattggtgttgtcaacatgcttatttttattagttatcctatctgtgcctgatgtgtagcaatacaaacctgtctgtctggcgatagacactgttgaaactgaagacgagtcgttctttctcagtatgtggatgtttgtgctcggttgtcatttctgaactgtttccaaacatctgtaacattttaagggaatcatttatgctgcttatttacataatgttcatgttggacacttcctttttttcctcattttaattctgcttaaggtaactgtttgcttttttattgttttaattctgtttttctctttttgattcctcagtttctttaatagcatttaccactatggctttattaacaataatggaattctcagtgtatcaagatacctggatgaagtatgaatatgaagtagacaaggatttttctaggtaactaactttttcttgtttaaaggccatgtacagtcagctgtggtggtatacatcattactcccagcagtctggaggcagaaacaaatgaatctctgtgaactccaggccagcctgagctacgcagtgagagcctgtcttagagaggaagggctgtgatgcccatagcatccgatgctttcctggtggtctgctctcctttgtcctgacccaggcctggctctaaggctggctgtctttctgttgggcatgtgtgccaggcacgtatgctcctctgagcactaatacttgaaccaggagcatccacttgataattccattccgtagtaaagaaacgacattgagggacacccaacgtaatgtgtgatgtatagtttttatgataagtggaagaaataacttggaattcctgcttcttgattcaggttttatgtccttaaaggactgttttatctgaagtttcagtaggccaaccttagtttcttgggattattggctgtaaagttactattaagaaagatgactgttaagcatggagaagcagaaatggtttttgaatagtcacttaagtgaaacttttaggaggccagagggatgggtggctcagtggttaagagttcacattgcttttgcagatggtcagagttcagctcccctacccacctcagggggttcacacaaaagagaatttttaaatgttctcgttctcattgtaaagactgcacattaagtcctaacttgcactctgctgtctgaagtccacatttttcatgggtgggttggttttcatttctggtgttttgctgattgactgatgactgatgactgtcctcttctcttttagcaagttgagaattaacattgacatcaccgtcgccatgaagtgccagtgtgagtacaccctcagcaccgcccggctgtcagctcactgcctttcctgaacatgactatagtgtaaagaaaaccatatcaaggtttctgcagtccgagttgtgatttggatagcctgtctgtcttgtagagagccaggctttgtacccccactccacaaggcattgtttcacctgatccacctttaccacacctttactctgcagtgtaaattacaggtgcagtgtttctgttaggtgaagagtgataagtctcctcttctgccccaaccctgaccgtgcttactgtactgataaaagtggaaatgtactgatcgatatctggtggattatgcttgaatcagcgatgatgctctgtatggaagtcatcctctaagtcactgcttggaaagtggaaaccagtaagacattacttcaggcaacgcttcagtaatgaagaagttttaccttgttaaagggatcggttctaggggatttcatcacaaaacaacagagtctcatttttcagtctcagttttctttatgttagtggttgtgagatatatggaaatacattataactaaatttttgagttagcactgatcctgaatctatgccatatttgaatatttaaataccattaaaattttagcttttcagagtaaaatttcctattctttactttttaaaatctcagtagataacaccttataatttctttgaatccttaaaatatttcttgtgattaatattatgttcagcatttttagtacttagagctatttaattttggcaagctagtcagtcagttaaccttagcttctttactatgtgtcatctttctcagagcaagaaggagaaaaataaaatcattttcaaatttcagaatactatccacaaaagctacgtaatgctactgttttaacttttgaacaaatgaaagttacctcaggttttttgtttttatatagcagatggtagttttgattgaagttcatagtgtaaaaactttgttttaatgcagatgttggagcagatgttctggatttagcagagaccatggttgcatctgcagatggtctatcttatgaaccagtaagtttgatttatgtgatggagaaaagttatacctaatatcaaaaacttgagattggaacacagctggcatttccgataggcctttctaatgtccgttacagttcaagtcactgctttctatcgggtcacctttctcttttgtatttgccataagaatggaagtttgtacttcgtagttgtctcaggactttgacctgtgcctaaatctttaaaaacatttaccctgtagctttcttatcattggcatttacccttcccagtgctgatttctcttaattagttctaaagtacaagctgtccataacatagctgactcaccacatagcgcattacaggactagcatgtacgattgaccaggactagctctaaaacagcttcagaaaaagcgtgtggcccactggcctcatggtatgtagtttacatacggctcactttaaaattcattttcttgtgactaagcaaacttgaagaataatgactacagagggaggaagagtagaattcattggctgggttgaaacaagaaaaacccctggactagttctgattgctgaattaacataagtttacagcaagaaaatacatgtttgtctttgatatgcacttgttttcattacttttaagtcactgacaatatccctgtcagagacaacttgagggaggagctgttcattgattgttacagattcagagggttcaggctatggttccttgacctcttatagttgggccaaacattatggatgctggaatgtgtgacagaggagcttttgtcccgtggttgacaggtgacagacaggaaaaggctaagagaagacacctgatgtcaaaaccagcccagtgacttcttcagttgtaccatcagctggggtctgggttttacttagaaacctgaggcaaatagatcatattgagaccataaagcactcctaaagtagaaatgttaatagaaaagtaatttattgttgctctgatcccctcttctgatctatttttccactaacaaagttcatagtaatttacatggagtaagtaaatgtaatttgctttataaatttagatactattataacgtattagagtgtgatctccagactgggatccaaatggttaccagtagacactgagatgtttgcattttatactgtttttagaacattcagttatcgagcttttccgtagcttgtaggtgtgtactcatttacacacgtgtatgcatattgagacttgaggttagcctctggtgtcattgggaaaggtgttgtccaccatgttttttggcataaggatctttttcactgtcctggaacttaaactttaggctaggctggctagccagccagctgctctcagggacccacctgtgtgtgtatgctgcacacacgttacatgtttggctgttttgcgtgggatcagattcagttcttcatgcttgcaaggcaagcgctttgccagcccagagttctgccttgccctgtgaccttttgtttcctactattcttaattctgttgttttgtttctcattttatggggggaggttttgaggttccttttttggcacaggtgtgtggcttggttttgtgacaatttcttaccaggaggaagagctgcagatgcttgagttcccacttacactgtgtcctgtctgtcacctgtctccctacccccatcctcagtgttatccttttcgttttagttcgttagcatgagtttgagtgtgttaagtcctaaaatagccattttcctataattgtcagtgactgtacacaggaaaatagttatcattagtaaagtttctctatgctatctttgaacacaacatcacagattaaatcatgaatatttcttattagtaccataattttatgtttcttgttcatagaaaaacatttaaacttgtgatacatgaccgccatgggatttatttgccagtgacggttcttttctttttgcaggcagtatttgacctttcaccccatcagagagagtggcagaggtaaagtgtgaacagtgtcatcaccagagaaacctagaccacttttgtttgctggaatctatgcatattttaaagtattttagtacataaacaatccttatgacctcaaaagctatcagatcttaggaaagtcacacataatctttcctgtagtatattttgaatcataaataaattttagtttttatttaaaattttaattaattaaattttttttttaatcatgaaagtatatgaacattgtttagaatttggtttggagcctggtgtgatgatgcttacctacaatcccagcatttgggaggcttctgccaggaggatcgtaagttcacctctttcctgggctaagtagtgagtttcaggacatgggttaaatacagagactatctcagaaacaaaaggttcacttttcagctttttcattctgggaattgccaaaccttgagtgatgagagccatgtgtgactccctaggaactttgtgttcaagaaaaagtgttttccccatcccattttggttcgcaagatggtttatatttaaggttttctaatttcagattattaccagaaatgtacttaaacgtctgttttttgttttttgttttttttttaagacagggttctctgtgtaacagccctagctgtcctagaacttgtaaactcacagagatccacctgcctctgcctcctgagtaccgggggttaaagatgtgcactaccactgccagcctgttttttttgtttgtttgttttgttttgttttttttgttttgttttttccttcagacagtttgttttctaattcctgctacacttgaggactctttttctttaattaccaatttctctggttggaagaatcttactattgaaattgaatatagttgaataaaagcagtgaatcttagggctttctgggtatctagcactttaattagagaactctctctaaagaggaaatgttacttttatccagaaatattgaagtgtggtgcatacttgtaatcccagtaattaagaggctggggcggggaactgaacccagtactggaagagcagagagcacttttaacccttgagtcttctcttctgacccaagctgactccttttatctagaattctattaggtattgcagaggagtaatgattgggggcagagaccttattaaggaagaggggtttctcatcgtgcttgggctttctgcatgccttcatacggagttcatacttggttgttggttgtgttccaagcagaagtctcacacagtttcctcaaactgctgccatccattaagcttaacttgaacttttgtagacttagaaaagatggaaagctctcaggttctgggcttagctccaaagtttatgtctttagatatataatctgctttctagatctttcttaattattatgttatgcttctaaatggatattgtagtgtagtgggaaaatctacaaggcctgtcacttcctaataaggtacatactagaatgttctttacctttggaatttgctctcttggctggtgttttgccttaaataggatcacaatatttttaaaagacaatttcaaaccctggacacagccttttgggatatctgctttctctttctatatttaaggtttatttcaaactaagtttattgtgtaaattcgatttttaatgttaacaaaacaggcctgttaatccagtattctagatggatagtgcataaatatttttctcatttctgtgtttatacgataattttactattgcgatgaggtatggtatattatgagataaatagttgtgtttttttaagatcatatgtttacatatgtttacatgtaaggtcccccccacccccctacttttaagttcactattagtgtagtttaagttcacagagaaggtgagtggaaagtgcagagttcacatgtctcagtctcctttatcagcatcaggcaccagaatggcttacttgtcatgtcaatgagactgcatggacccagcccaacattactgatggtctgtagttcacttgggagctcccttttggaggtctctctcttgagtggacagttgggtaatgatatatatccaccattgtaccatcaagagcagtttcacgactctgaaagtcctcgctgtcaccgctcatttctccccagtgtgtgtagtttgtttgcttgctatgctgtgacttgaggtgttacttatttaaggtcatgatgaaagagacgaatctaagcattgttttatgttttttaagatttatttttactgtgtatgtttgaacatttaaaaaatttgtagtttttagatttattttatgtgtgtaagtgttctgcttgaatctatgtctgtgtgctgtgtgcatcctggaactggagttatgggcagttgtgaatataccatgtgggtgctaggaatcaaacctaggacctctgctggaacaccaagtgttcataatcatttctctagccctccgtgtgtgtgtgtgtgtgtgtgtgtgtgtgtgtgtgtgtgtgtgtgtgtgtgtgtgtgtgtgtgtgtgtgtgtgtgtgtgttgtgtgtgttacctgaatgtgtcttgctttacagggaagatgatttgttactgactccagatgcgtgcagaatccacggtcatctatatgtcaataaagtagcagggaattttcacataactgtgggcaagtatgttcttttcacttcctgaagttctttaggtggggttggagcttgattaaaattactccttttcctagtacacaaccaccacaaagggcactttaaagtgttgtctgtgagtaaataggaattaaaacctcttaatggtaacttttgtagccagagagcctgaccctagatgttccatcagtgtcttcatttattgatagtaggtttttgttttgttagccctttggtagttctcataaaaaggacttcccttagtaattctagaaaaactcaaaagttactaatgtgtagtatgaagtaatttaggcaaaaacttaggaaaactgccactatcctcctgaatataatccagcatcacaaaaaactcttggtagatctcaccatgggtgaacatctgctccccagcttcctctttccagggagacctgatgagctcttcactgtctcagccattgcctgaatacctgatgtgtgcagagtactagtataggggaacctgtagccagcccctaagcgggcgtggctacaggttcccctacattctagcctggagactcagggtcaaacagtgaaaagaggaagcctttactctcctgcgtgctgaagtcatacaagaatattcaaactttgaccagtaactacattagctgttacttaattatagttgtattgaggctgtagaggagatatatagccgataagaaaaattttgacattgtctacaagtcagcagaggcttcatgaggaaactttggagttgtatggggagttaggagttcacatcgaacagagagcatgtcacagaagagaacttggcttcaagggtggctttggtttttttgtttatagaaagagaacattagatttttatatatattttttgttggttatttttgtttgtttgggttttggttttttagagacagggtttctttgtggctttggaggctgtcctggaactagctcttgtggaccaggatggtcttgaactcacagagatccacctgcctctgcctcccgagtgctgggattaaaggcgtgtgccaccactgcctggcacatacatgttttttttaatcaggaaagtctttattgcttataataatcagatcaaaatttagtttttctttgctgtgcttttctcctgcaaattcagattttgtcgtttggccactgttgagtgttcatttaccaaatgcagatggtcctagggactttgaagccttggtacccatagaggcagctcatgatggagaaggcttcttcagctttccttgcaaacagtgccctagtccaagaggaagcacagtgtgagcttctatatatggcctatattttatttttggctgtttttctccccaatttcatacctttcagcagatggtaacatatatacatacatacatacatatatcaatcagaccccaaaggaaaagcttttgttgtgtctctcaaactccagtggacttaccttttctttctttttcttttctttatttttttgtgtgtgtgtgtgtgtgtgtgtgtgtgtgtgtgtgtgt

SEQ ID NO: 37 - DNA, 631989 bp, Cricetulus griseus
  modified_base (27435)..(27483): a, c, t, g, unknown or other
  modified_base (115988)..(116163): a, c, t, g, unknown or other
  modified_base (178045)..(178291): a, c, t, g, unknown or other
  modified_base (210690)..(210717): a, c, t, g, unknown or other
  modified_base (231990)..(231999): a, c, t, g, unknown or other
  modified_base (257630)..(261324): a, c, t, g, unknown or other
  modified_base (264590)..(264614): a, c, t, g, unknown or other
  modified_base (271207)..(271462): a, c, t, g, unknown or other
  modified_base (309069)..(309169): a, c, t, g, unknown or other
  modified_base (322641)..(324219): a, c, t, g, unknown or other
  modified_base (334465)..(334495): a, c, t, g, unknown or other
  modified_base (350232)..(350241): a, c, t, g, unknown or other
  modified_base (356267)..(356374): a, c, t, g, unknown or other
  modified_base (364325)..(365335): a, c, t, g, unknown or other
  modified_base (388535)..(389136): a, c, t, g, unknown or other
  modified_base (431575)..(431707): a, c, t, g, unknown or other
  modified_base (465258)..(465288): a, c, t, g, unknown or other
  modified_base (465497)..(465701): a, c, t, g, unknown or other
  modified_base (540074)..(540237): a, c, t, g, unknown or other
  modified_base (543149)..(543265): a, c, t, g, unknown or other
  modified_base (585616)..(585695): a, c, t, g, unknown or other
  modified_base (615469)..(616634): a, c, t, g, unknown or other
  modified_base (617073)..(617179): a, c, t, g, unknown or other
  modified_base (617512)..(617652): a, c, t, g, unknown or other
  modified_base (618244)..(618267): a, c, t, g, unknown or other
  modified_base (618400)..(618438): a, c, t, g, unknown or other
  modified_base (618684)..(619156): a, c, t, g, unknown or other
tgtatgatttcttgctggcgagaaatacagagcgcgcgggacactccacaaaacctggcaactatcctccatcatgcattggcaatagtattcaattctagtacacctgaaaagtactatgtgaactccaataaatgttatcaataaaagatctgcgccttggtacagtttctttcacattttattcttacagatgtcacttgtttctcaagctatttagtcccctttaatgagtttgtttcagggactgggaaagtaattcagttcatagaatatgctaggaagcatgaaggcctgggtgtgaccttcagtaccaaataaaacatcatggtagcataatccccatagtcctagccagcacttggaaagtaaaggcaggaaggttagaaattcaaggccatcctggactacactagcaagtttgaagctttgctacatgagaccctgtttaactaaccatacttacaataagtttgtttcatacattttagtgtagttaaattgttttggtgacactctgcattccatcctgggctctcctgctgtggtaatttgaataagaatggtcaccataaactcatagatttcaatgtttggtcaccagggaacagcacttttaggaggtgtggccttgttgggatatatgtgtccttgttggaggaagtgtgtcactagaggtgggctttgaggattcaaatgatcaagccaggcccagtgtctctctcttcttgctgcctgaggatccactacttcccaccattacaacaatgaattaaacctctgaacctgcacgccagccccatttaaatgttttcctttctaagagttgccatggtcatggtgtctcttcacagcaatagaaaccctaagatgcccatcattgatattttttgtttatattaaggtttacttaatgtgctataaacttctatggcttttgacaaccccaagctgtcatgtatcatcaactaacaaatcataaatgacattttcaccatgataaacacacagacacacaaacatgaggatataaaaagggtgcagaagccaactaagacagctaatactaaagctaaattcctaatgctttgacaacaaaatattgttagattatttctcaaagtgaaaagcagtgtctttgtcttcataaagatactagtaaatgaccaaacaaacaatagaggaatacaaatcttccgtgtaaaagaattccaatttatgtagctcctctacccaccaggaagcatgcaggcaacccctgctccttaactgttgactaaacatcttgccttccttccaaagactacagtatagaaaaaggatgaggaaagataacttcacagggaagaaagtgaccaacacagctacagctaggagatgaatgtcaacatcagcagagtgtaataaagttgataggataaaccctttgtatcatgtgatggagtggcacttcacctgtgtaatcttctcaacactgtaactttaatgatggggaaaacatttaaattccatctatgggacatctacaaaactcctgaccagtacttctcaaaactgtcaacatcatcaaaaccagcaaagtgcaaaacactctcgaggccaagaagttaaggaaaacatggtgaatgagcataatacggtatcacagatgagaagctagaacagactaggtagcaaagtaaagggggaaagtatataaattcaaaactttccaaaaaataagctttactattaaaagataagagtggcagccaactgttcataatctgtgtccagtaaatagggaactgatactgttaaaggatgtgcacaccccttgccagacaggttcccatgcagggaaggtcattcatctcagtccagccagctgggatgtcaccggcaaatagatctcagtaaccacgtagaccctcctagcccattcacccttttcttctcaatttctacacacattcaatttcacttttattctgttgttgttattatttcttttaatttatgactgttgatcttcttatatttcagacacaaaacttcttcagtaataacttcttattctcagggtgtaaaacataaattctgttgattttcttgcccacaactgaaaaaaggagccctgtgctgtaagactatcttcccgattccacacactggaagttgcaacatattgttctaatgaattgctagcatttgtactgttcggcatggaaactctaatttcctgaagccctggatccaagagatgaaccactggatggttaaatgaaggaagcaaggcggcaggcaggtaagaaagtaggaagataggaaagaaggaagaaacagggagggaacccaaggttgaattcccataagcacattcactatgatcaagccagctgccaaggagctctcagtaagaaaatgctttaaaattgctgggacactagagtacttcccacctgaagaagtgggacaaaatctctgggtgtcactggaaccctacataaaacatgttataataccactccaagacatagtccattttttcctgtgttttgtgttttatgagttagttgtattttccttgactagttgtagacatgtttgaaatttgtaaattaatcatttaaacatcaaaatcaaagcttctttgtgggtagaaccttggagtttccttatttactaagcttgtttcactccagaatcctggagttaagggttttgtttcagagaaggaaaactttatagagttcagaggaagtattgtcacagtttctcctgctttcagttacatttcagaaacatattttgttgggaaggtgaaagaaaacagcaatttagagtatacttaagatagagctggtgcctattactgggcatccctgtaatgtttttatgactttggtgtcaacatgcacccctcccaccatcccaccccacaatccaataaatgcctactctgagttgacccatgatctaatggcccatggtagccatttgatccttcttagtgtttaacataattttttcaggttttattatccaactcaagtatttcagaagtttccaatcctctttctctgaaaggccttcacattttctgtagactctcacatggaggtgatgactgttgggggcctgcaaagctaatatgagcaggcttccactcattcctttcttggtcactggagataaaagtacaactccatttctcagcggcaaaggtactgaaatccaggaaggttgtcactgatctcaacatcacggggctttggaaaggactggagctgtggctttcagctgtggctccacctaagaacaacctggaaccctttgcaaactcttcatgtccatgttccttctagaatgatcaatccaggcttctgaaccttagggccagcgtcagaatttctacagttctcattctgatgtgtaaactaaatttagaataatacagcaacaagttgattagtaactaaccttgagtggttttcatgccattctttttatttccttttttgtcttacatctttgaacaaacaatatgaagtatgttaggcccatcacaatagcagccagcatcctaccacttaacaatttcacaggacttttcattggaagaaaatatcacaaaatagattacatacctccagcaaagctgcagtttctttttgctttctaagcctccagaatacagtttatattaacctaaatcccccaaatagtctttcttttgatttatgggatgaatgtttgtcaacaaacactccagtaatctcacttaaagaaaactgtgggtttttttccacattcctcaagaagacttttacccaaacaaggaagccacaaacacaaagaggcagaactcagcaagggattcacactgaccttataataaacatgcagccaaatgcctaggccagcaactttttttctaccagaagctatttttaaaacatcaacaaccaccaccaaacttcactgcaatgaacaaaagggattaaaagctgcctgaattttatgcaaataactttgtatttgcaatacccttcttggaagacttctctgtccccaggctctttacttcatggatgagattattttgttgtagagcaatgccacccacatccaccccaaaactgaaatgtaaaaagaaaagagaagcactcacaggagtatctgttttatagcccaggccatgatgagatctgtcaaaaattaggctcaaaactgattttctagaagtccaagagccttgaagatctcttttccccttctttcccttcatatttcatacagcagttccaaggccttcatggagattgtgcagagtgaaatagcagtggtgtgtgtgtgtgtgtgtgtgtgtgtgtgtgtgtctttctgcgtgtgtggtgtatgtgtgtgtgtgtgtgtgtgtgtgtgtgtgtgtgtctttccacttagaagatcccctgatgttttcattctccccttcatgggtgattaaaatgagcagttttatgagcatttgtagctcagtaactacttccaaacatttacattactataagtagatatgggaagccacttaactaattctaattattagttgttggggatgggggggcagtactactgatggcattctctgtgtcaccacgagaaccaagaccaacatctttaccagacatccgcaacagagtccttgacagcatattccaccctataccttcactttctgcttgctttaggggagctgttccatcgggatcatcgttttctcccacttccctctgctgatatttccactaaacgtttcaagaggggcttggtaggtctgcgtcttgcaggttgagaaatcccagcctcagaactccctgcttgcctctgattctgcttgcttcccttccagaatggtcttgctattctgtttagttacaaagtttggtctttgactacaaccagcttcagttcatctgttccccctggtgtcctccctctctgtcccaatatccaccaaaagttttccattactcatattatatgtaataaacaataattgaaatgaaatgactcagaattatggccagtgagctgcagggtttaatcccagcacttgggaggtggagacagaaaaatcaagagtcccagttatcctcagctatttggtgagtttgaggccagcctggactacatgaccccctatgtgaaaaagtacaacaacaataaaaatgacccaaaggcaatggtgatcaatacgcactgtataaatgtatggaatgttcaatgaataaaactattatttaaattatttttttaaaaaaatagggaccagagacaatagcttagccatcaaaaacactgactgctcttccagatgatctgaatttgattctcagcacccatatcaggtcacaactgtctgtcattccaattccaagggagcgatagcctcttttggcctctgagggcaccaggcacatatatggagactgcatacattcactacatagttcaaagacatataagcaggcaaaatacacatacacatacaataaatattttaaggcaaaaaacatgaaaactataaaaaatgaaaaatataactcaaaaattttaaataatagcaatttgagccctggcgcgagctggccatgtcactcataacatctacaatgcatgcccattttccttttcttcttgaaaaagcattcatgctctttgtggaaaatatatacagagcctcttaagttgctttcttatagagaagttacttacgggatttaatgaataatgaaggatgaaattacattgcttttctgatctcaactctgttaaaaagcccagggagtagatacatccaaattcagtaggaaccatcttttcatttttttccacgagtattgatatcttctctagctgtagaagactagttttctccaaaagtttttaaagttttatttttttaaacttatatgcataaatgttgtgcttgtatgcacatacgtgaaccatgcaatgaatgcatgcagtgtccaaagaggccagaagagggcaccagaaccccggaactgtattactgcaggtgctgggactcaaacttctggactgcacaaaagcagcaagtcttaaccactgagccatctccccggtccctagccaaagtcttatttatcaaaatgctgtttaaaatctctgcactttgccaatcccactctctgccagccagatctgcagcagcagataagagacagcttcatgccagacttcacgatattcaagtttcccaagatgaatgccaaccgattccattcaccaccccacccccaccccatgatgctttccatcccttaccaccaccatcaccaccccagggaaagttaagacatgctcccgtggccttggcttgccagctcaatttcaccagtccctcgtattttttccatgctaatggctacatgacacatacatattttgactccagtgattgtccacatgggttcctaccatctttggtccaatgaagagcatgggtgacaaattattgcaggaaatttagcttcagtgagagtgccatgtgttgtgggatatttgatcacactgtgaatcccgagttttctttaattaaataaaaatcaaccttgtttcaaggggcagaaccagcaactagttcaccagaattagccatgaggagccagaaatatggatagagagacacacaggaaggagtaggaaggggacttggagttttgcagtcttttttgtttgggacgaatagagagatgcatcttttgcagggtctctggccaaaaagaaggtcagctggttgcttcttggcctcgctgatctagcaggtttgcacccccacatctgacttctgagtctttgttggtaaatagagtgatagaatgacagtgacttagttaaaaactgcatttggtagccctggccaagctggggctgtgggacagaagtccttccaggccgaagcctgagtggcaggtagaatgctgactgctgggctgtgaggcctcagacagtaattaaaataccagtagatttatgtgcagccactaaactgacagaaaaacatcagtcaggatatcaagtgtgtgtggtccatgcaacctccttcatactctagaactttcctcgtagacagggcagaagcttttgtgtttcagctaagacattgggactgtggattcaaagaggaacttaacttcagctagaattcttaatttccaaacaaagtcaccacgagtgaacatttttagcaggagtttgacaaacagcaactgatgaagcagcctgcttcgtggctggttctgcgtggcttgtgtatccttgtggccaggattccatgactctcaccttcccactgcaggtcccacagattgaaccctcacccagcagacgttccctcctaccctccctgccatagtgctgctgcccagcttgaccccagctctacttgaaggtttgaccttgtttctgcttctcacttagtcctttggactcaacccaatggatccattcttgcatctcactccagcactgaacatctagctcctattcttccactgcctgcttcctccagttgtgttctactgtgaaggaatcccactgtcttctagtggtggctataggatcagatcccagccctttgacagatgagtaaaccctattcctatagtttctccagacagcagtctgaggataactaagaatgcagtccaacatgaaaccagaagcttactcaaaacacagaaacttttttcataactcaattgtgtgatagatgacaaggttgggcatgtttgctaatcatccacagagaacaaggccattatacctggacttactatcaatgtcaccacctcaacagtgatgtcaactactcattctggcaggtctggtgcactggcctggatgagcttaccagctattttataccattataattcctacaattacagccattgctagaatataaactaacagccaacatgatcctgatgcactaaggggggtcatgaggaacttactgaagcctgacctgtacaatagaataaaatcaaattgaactaagcctgcacctctataaggattcaggcattatgctggcctgcccctgccactggcaggatgcactcaggcagtaccctggtcagcccaggggtccatgaatactagtctccgcaagcaggtgcaaaggacccttttaaaagacagaccctgcccacttatgatctctttttctcttctctttcctctcttctctctttctgctctcctctctttctgctcctgtctccctcttctcttctgtcctctgtctctgtgtctctttacctcttttctctttccttccccctccctcccctttctaataaaatttctcactcaagctctgtctgcctggcgtgtttgtcccctcacctcagtcaccctcgctgatacagtttacaagtcaacactacatttaccacagaacttaaaataatccaatacagcaaagactaacccttctatcccacagccttcatccgcacttcctaagagtctggacagagtaccagcacacacaaaagactttgttttgaagtgacctctgttttgaagtttcccatccctgcctctgacttctatcggcctgttgctcgctattgctgccctcttctctcagtggttctttggtttggtttggtttggtttggtttttttcagttttttgagacagggtttctctgtaggtttggagactgtcctgcaatgccctttgaagaccaggctggcctccaactcacagagatccacctgcctctgcctcctgaatgctgggattaaaggcactcgccaccaccacccagttcttaaagtttcttcttatttctttcataaaaccaggagggctttcccccctaattaattcaaaagttcaaataaacaacaaagcaaatgtgagagtcagaaaggcatatccacagcccttttcataaatggctggatgtcttacttgtctctctctctctctctctctctctctctctctctttaatgttcctcttcagatgtaatggtatcactaaccaagcattcaagcaaggctaccgcagttctactgcagtttacaaagtgaaaatcttctcacccaacaagtacaccagtaggagatggggacaatttttagagccccaaattaaaaaataatcccactatttaatacttttgacagccaacccttcctccaccagcaatttgtctgagtaaacattcttcgaagctgacatttcccaggggtgtgatgcaatccatagaggagacatcctgtgtgcgtgaataacagccgtgctcccagctctgtggcccataacagtcatccattttgtaatgtttgcttttttttttctccttcctcttcctctgttctgagctctagaagtaaattaccattctcacagatgtgtgcccagtgtacaactaagctgctgttccaagtttagcagcacctcaggcagggacatccagcaaaccgccactggctaagggccaagcccagagctcaaccaacactgcaggcgcttcctcctggcctcctctaggctatgggatttcccaactgttgtaacagctctgacacgtgtctatcagggatgccaaacacaaccagaacctccaggaacccctcatgatgcctccggaagttaattgcctttgctgctcaatgcactctcaactctcattagcctgggcactggcctcagccctaacctcctcatcccagggccagctccaagtcggctctgctcttgtgtgctctccgggtgtgctaggtatccactgcactgcacctgaagaaggctcatgcacatcccaggcactaggcatccgctggcagcctggcccacgtccttctaccccaacaacttcaatctactccacttgcctctaattccagtgacatgtctgtgacacaaactaaccttgaagaagtagaaactacctggagtggagactgtgggaggagcccaggaaatggagaataggacatctgggagtagataagaatatctatgtccatggaaagaaccattttatcccctcccacttaaggggcccacacctccaccacagcatctggtcttctcctggacctgggagttgggggtagaacatataggctcatctgtgtaggaacacactgagcagcactgtgaaacaggcagaatataccccaagtctagtcccttacttccattccacgggctcaggggtgcccctgaaatgaagcccccccacacccgtgcccactacattgagataatgaggtaactatgacaactaccataccaaagtttgtcagagggaaactcctcagccaacattttgagttcttcctgtgtgttttagattgcaaatggatgttgtggtgtgatgactgaaacattaaaaaaaaattgacctaggtaggttgaaagaagtaagcgaggttcccagggaggaatatttcatactaaaatgtgttttctttttattcgccatgtatctggcccacagtaccctcgccccttcccctctctggctgcagaaattggagcattttggaacatacctaaatctaggtggtcctggtcttcgtgttcgttcagtccatccagctggcttttggcacactgaaaaaggcacaggagaggcagttcattgaattccatcttaccacactaatgtttatttcttgtgagttgagatgacgctcttggaaaacatcaataaaaccacatcactcacatcacaacacacaaacaggaaattcatctgtgttcataattagcactgagagctaaaaataagtaaaggatgtgtgtccagctaaaacacacctgaaagctgcccatgggtaaagcagtaccagcaaacagccatgaatgagacaatgccaggaccgtatgttctggaggatactgtcaaacagtgacaacttggaaagatgttgaggtttggtcataaaagtgtagcccattgcaatcctaataaaataaattggatttggggcacactcctgcttacttgtagatttttatgaacactggctcaattgtcatgtctgctttaacacacaaggaagacaaccatcatcccttacctttccattgtcctcctcaggtggaggtctgccagactccaaattcttaatctctgcaaaagatataattcttgttagaactgctaaacagagcgttagtttaaaaaaataggaaaacaatgaaagcagatgacaagttataagcaaggcattagctaggtttttagattagactacttaacagttgaccctaccagagaataatgtattggtcacctgaccgaacacacactggtattatttgtgtacactaagatgtaaacaggcagggagctgtcactggaaatcttggagccacagggctggggaggacattaaatacatcagtgcccttcacaacaaaggaaagatgctcatccccaaagcttcagcatagatgctgaagatgcaactggtgcccacctgagcaaatcccactcgtctcttcccctggattccacagatggcaaagggagaaagaaaaaatgactaattcattctcaaagagacccagctgtcccttctgaagcactgtaaggggagcacgccacacagccctcagcaccgacctcaactggccaggctggctaagccgtgactggccccacatttcccctcacagcaaagctcttcctggaagcaatgttcaggatgttctgtgatgaacatgaaaatccaggtgaggccgcctttttctctgttccttggctgattggttctcttcccaaatactcagtttcccagaaacaagctttaagactatggaaatagttacagtgtgcaggtttaaccctagggaaagtaagtgctgatatccctagcaggggcaaatagctgaaagtggtctgtctgaatttaaagaaatatacaaccttctgggccttgggatctttgctggaatctcagcttcccggaccctaagtacctttttgatatggtcccagagaaaagccagaaatttccccagaaagttcataaactggacattccctacccttttgtctctcctgctaatttcagttgcctaccacctcaaacttccaagtggacttattcaagctcttcatactctatgtggtacagtctatatttctgcacagaaaatgtactgggccttatttatatggctctccatgacaaaccagacaataagggtgatagatcgcaaagatgggacaggaagtaatggggcaaggacgaagcagccacaaccccacttgtcaaactttttaaaaatacttctatttttggttgtgagcctagcatttagcagatgagccatctctccagcccttttttaatacttaagaataactgaatctgggctagggggatggctcacatgccaagagcacttgctgctcttacagagaacacaagttcagttcccagcgcccacagatgctgctaacttcagctccagggcacctacacccttttctggcctctactagcaccctcacatgcatgtgtgcatacccacacacatcacacaaacatacacataagtaaaaaataatttatttttttaaaagaactactgaatttgtctcatatcaaccaagcaattctacagtgtcactggacaactgtttatcgaccatgaactcataatgcttattatgtttcatgataaaaatgaaaacataataacctcaattttatgcggttgtgtcaactctactcaacagagaatagacacaaggtactgaagtcctgcctggtagcttatacaggtagcatcaatgccagcttttacatgcacatcacaatctggcctcggggtggcggaagagtaacatttgcgtaaagaacagccatatatgtgaaaacaggccagttttgcctttgagagtgaatcccgtttcagtgccaaaagtccaaagcaaacaaagcaaattttccagtccacttcatatgcacagaactggtgtgaatcacctactatgatgtttgccatttaggtgttgctgaaaaatccctttggaaactcatacctacaagataaaacttcaagtagagaagatagctacaatgggtccaaagagaataaccagaaccaagatcaggaacacatccgcaccagagaggaaggagaccatgcaattccatcctgctggctacagcctatgcccataacaccactacagaccacggtattcctaaagcattccatacatgcaggcatttattctgaagagcgtcctggaaaacaggatatggcctgttatccattggctttcttcctcagcccaacccccaaatgaccatgatcttggcacatttccatccccacattttccccttaaagtctcctgtgatttttttttttattttttaacttttaaaataactgctgtagaaaataggacaaaaggaggtaatcatattaagtgaaagaagccagtctcagaaagacaaatattatcaatttctttcatttgtggctcctagattttataaacatgcataaaatcatgtatgtatacatgcatgtgtgtatgtaatggaagaagtaaaactaggggcaaagtagactaataagactgaaggaagggtgaggaaagaaagggtaacggcatgggaatagactcaacataatatctacttggtaaaaaacgtcaaagacaaaaaaaatttcaaatatttttaaaatctgcactgcctgtaacttatctgcattgtaattacttttaactttaaaactaactttcaaatatataaaaatcatcaccctaaaattacttaattttgtgaaaatgtgaagcctctgattcataactcatctttcattaacttagaggcactaaccagaatgacatctcagggtttctcagaaaatatggtgctcattctactggggtttaattaaattgctccaggagcatttctgctaaattagtaggctccttttacactagcccagagtaccaccaattgcacagtgcaatcaaaccactcgttgttatagcaacctttggttgataatagtatcagtaactctagctattctgttttaagggcctgttaacattgtcttcaaggtccacccacaaggaaggattacatctctaaatcacacttaccaaactcgataaacatgtttttttttttaatattgccaaactataataaaatgagataatctctagtacttatgttcactaatgacacagcaccaacaaacagggatttttaccccagggataagtagctgtaaagttaatatctgtttcattaagatttccctggagaaaagctcatctctgtgtataagctttattacctctgcttgccaaatggagccagagtctaggtttaagcaacaaaaagtgagtcagaactctctcaacagccctatggctaaacacaaggaaggagcaggagaaaaagctctcaccagagctaggctgcccaggagtacagccttctactatcccattctacaattgatggccgcacctaactgagaccagcagagatgtcctgcacatagctggcaagctggtggcgataaccatgtgctctgcctccctaataaataaaatagcaccctagtgatgctcatcctcaccctacaacccctatagctatacactaattcatacataattcaatgtcctcttgagtgtgtgacacaagcctgtaaccccagcactggggaggctgaggcagagggtcacatagtaagttccagaacagcctgaactacacaaaatgatatcctgtctcaaaaaacaaaaccaaatacaccactctttgaatgggtccttgtctcctcatgggtactgaatgcattctggaaacggactttgggttggaaccaaattggtctgtgaacccatgattgtatcccctgcctgttacatgcaaggtggggaatcaacaaatcccccacccacctacatttgttgtccaaaatccatccatctgatgagatatagtgggtgttgggccagctctgggtggggagagagaaggaaagttgcttgctttattgaattgcaaattcgaacacttgcagtcccagcactatttcattactacagttctggccaccagactgactggacagaccagggttctgccccctgcttcttcccacacatgtagccctggcacctctcttgttgtgcaccaagatttcactgttgacttatttacttccttctatggcacacaacatgcaactctcggtgccagacagctaacgtggcaaaagagacactctaaattcacaaactattataacacttgaacttcggttaaattcctccccttttccccaaataggaatattaatgagaacactcatgttgctggcccagcacagtataacgtgggggaaacaatgaagcagttatccacaaaagtcccaatgagtcttttcctccaagtgctcaaatattacaggcaatctcacaagctcaaatcattccaatgaagctacagcagcagagataccaatgcaaagatggaatctggccctcaagtacccccctcccttgtgctggctccgggtcattttatttttatatctgggattattcggaatgaaaaaggcatcttctggaaatatttttatctaaattattcttaatacttttttctaagctacaacagtaattgtttaagaaaacttgaaaaataaatatcaatataaccactattaaaggagaatatagcaaattttaatgtatgttatgcttatctagcctagctggagtgtaatgcatacaccacactactcatttgtttaaggcacacgcacaatttgtttagctttaatatggtcaagatgtgcaactattacccaccattagttttagaacattttcctattgtcaacatgaaaccccacagccatgagcaatcactctccatagttcttcagctgctctctgacctcctttccacagcccagccctggcaaccactaccttaatttctctcagtggtttgcctgcttaaggtattttatacaggtcgagtcatgtgctcttttgtaattggctttataaacatagcagcatgtcttcaggtactctatcagtacttctttagtttttaatgattaaaatctttagtggggggtggaaagatggttcagtgatgaaaaatacttgctgatcttccagagtaccagagttaggttcccaagacccatgtcaagtagctcacaacaacctataactccagttttattaaatggaaaaaaacaagcaagcaagcaagcaaacaaacataaaaccaaaactcaactacagaattattattagtatagatgctccaaattttctgtgcttaagtgaagtaaaacaggatttgccacacaaaataaggctacatgtgaaatatggaagaactgaaaccagcaagcataaatgcaacccatatctgcattttaaaagtattaaacatggggctggagagatggctcagagagatggcttaatttagtcaacagcttaactaagataaagtagtcacctttcaaagagataaagtgtgactttaggattgcttttatcccttgggacttcacttagagtttacttcaagaaaggggttctttgactacatgcttaagataagctatccaaatctatttctccttagctgagttttactcttgtcccaagcctgataatttgacccatctggaagaaagaatctaatttaagagtgaaacaaatttattgccttgaggtgcactatgtggagcccctggcctgtgagcctcataaggtggttcaatcagatggtctgtaaaactagctccagctgaagccatcatccttcaattttttttgatacagtggaaggagagaagactttttgttcatgtatggggaaaagctagtagtattgttctgacagtgtgcaagtgggcctgctctcagcttgacagcctgtcttcatccttggacctttactgatgaaagtaatttccttttaggagaaacaagactggcaaactcaatctctagagaaaatttggagaaggatgtgcttgccagtagagtgaaagaagtaactacaaaccaccttaaaggaacattcactgctgtctttttgtaatttttaaaaatgtattttttgttcttgagggaaccactgcacctatttccatattggctgcaccctcttaatcactaccagaatagttgttgggagaacatacataagacttgtgtaaacccacaccagacaaaatcccagtgtggagggtgggggggatggggtgcacaatccctccctagctatgtagctattgacaactgctagatgcttggagggggagagacagtattctctaagactatggcccctggtaagttggccacattccaatggaagaccacaagtccaagaataaatgggcagcagaaattagtcttgaaggattaaaatttagaacacaaagttagaagggtagggaatgggggtgttgaatctgagaagcattggggagggggtaaatatgatcaaaacaagttatatgaaactttcaaagaactaacaaaattttttttaattgatgcaggcttagatatatttacatgtacacaatgtatcagagaaatctgcatttctaccatgtctttgatttcagagcctataaattcctctttctagttcttaaaatatctaaggtgttataaatcacagtcaccctgctgtgctatggagcaatatgttccttttacatgacagtatgctggcatctgtcatccaaattccccataatatttcctccctctccctgattccccaccttctcagcctctagtaaccactttcccactttttcctgggacatcaactcttgtgactaccactgatggctgagagcatacactatttgtctttctgtgcccttccatttaaaattactaaaaatgcccaaattcctctgttttctcctcctcctcctccttctgtttttttgagacaaggtttcctctgtgaaaccctgagtgtcctggaaccctccctctaaaccaggctggccttaaactcacaaagatctgcctgcctctgcctcttgaatgcagggattaaaggcatgtgccaccacccaccactgtccagcttcctctacttcttagggaatggtactgatcaggtcttagatactccaaactagaggaggaggtggttgtatcttcaactaagtcatcatcttagaaaacagtttcctcaatgatacacggaatccccaacacctcagttcccagctgccctggcttaaagaacttttatcttcatgaagcacttgtaccacatgcaaatattctaaaaagccctgagttgcagtatttaaaatgaaacatctcagaaaggaaactttttgtggataacagccctcttactctcccaatactgtctcatgggaaatatgcaaatatggagcaccagtcactcattcctccacaaaccacatgaacaattcaagcaaagaatctgctcacttccagtcacataacatacttctaccactacctacactccagtataggctggagttacttaacttacactcagagccaggcaacaggcacaaggccaccactacacaagagactgagcaagtgcctcaccttgggtattaaatgacaccgcacctctactcccctccaccctcctctgccatctccacacaagcacacaggcctgagtagctttcataatgctgaaaagctagttagttcaagtccacagcagagctgagttatgagctgtctgcttgctgtctagcagcatgtgtcatcgagacaagtctgagcatgcgggccacaaatttcctagtgacaaaagcttgagattagcatttctaggcaatgattctgatgttacactttttccatcacacaaacaccagcgaacattcgagaccagcagtgtgaacattcaataaatagattctctagtctgggagtggttgggctattggagtgcagtgtagataaccagctgacttctcactgcctagacaagacatgctacttaagaaaatctcttctgcgctactcctcatgaagagtagttaattcctaattctcagaaatgccccttccccatgaccactagtgtgtgtgctccatgagtacctagagcttccttgggttcatacagactcagtgcctgggacagggcctggcatacaacaagtgctcaaaaatactggaggaaattactaagagtagagttgagagcagggatcttgtagcttgcttttgtttgctgctgattctgcaggcctacaatagtgtccaatacaaagtaggcacaaaatacattgttatatatggtgatatattattcatgatttattgataaagcttgcctgaggatccagaaaacaaagtcagcctcaagctacagagatcaggaagtggtggtacatacctttaatcccaaaactcaggagacaaaggcagatggatctctctgagttcaaggccatccagggctacacgagattgaatcagtctaaaagagtaacgctttaatcccctcaccagacaggtataaaatataggagcttgggtcttcagagtcagtctcaggattctccagccacgttgaggagagtatagaagtctgggattgcagtctgaggtgttgtggagccaggatcgcctttcagtctgaggtaagacctaactgactgttttgcttttccgatcttcagcttgaagcttgaacctcaatatcagtctctgggtcttttatttaattgtgttacagttatagaccatgcaaggagagaacctacaggactccagctacctgcccaggctgtgtcttgtggtgagttcttggcctttctcatcagatccatacaggtaaacagctgggacagcccagtcccaaaggaaacagctttaccctgttggaactcatgttccaatccccatttcctgtttccttgttaatgaagctatggagggcaatattacgggaaggagctattataataaagtcacagaccaatgacacagaagtgagacagcacaccatacagatgttttgttccatctacaaaaacaatttttaatgaattaatatgatcaaactatattgtttacatagaccataatcaaatccactcatttgcatagttaatatatggtaataaaaataaatactaaaaaaatgaaaaagaacctggatttacacagtggtacctgggctgtaatagttctcagcttgcactatgaccaataatttccaagcaagcaaggcctcttatacaccaaaaactgtgaaaaccaggtgcagtggttcacaatttaatcacagcattcaagaggtagagaggtgaagtggcctcatatacaggaaggcctgggtctcaaaagcacaaaaatatacagggaattttagcagggcattgggaggtgcagatggcctcacccaaacaagaccaccctgagtggtttcatattcacctccctagaccggtagcagagaatgctactgtactgagagatgctgaaaatcaaggtggcagtggaaaagggaatgcagtgtgcgaaagggtcgggggagatgttcactggcatcaacctccagagtaccttcctcagaccacctcctaaggatgtttcattgaccatctgagttgaaggaggctacacaagttcctaattcttgactcactagaatctgtgatgcagcaaatgcattccaagtctctcagttaggtctcacagagagcattttctatgtatttggtggaagagtccttacttttcagaacatcttctagctcagtgtattgctttgcaaaacattctagggtataaagtagacacggtggtgcacacctgtaatctcagagcttgggaggtgaggaccggaagataataaaattaaagtcatccttggctacataacaaatttaaggccagcctggtctacatgagaccctttcacaaggaattggggaaataaaacaaaagaaaatcctagagtaaagggactgttaagaataagactaaaaaggctggagggagaatggagcttatttcttttcaaatggtctatggcggtctgaatgagagtgggtcatgtatttgaatgtttagtcaccagggaatggaactcttcgaaaggattagaaggactaggaagtgtgtccttgatgaaaaaggggtgtcacaggggggtcattgagatgtcaaagcccataccagtcccaatcattccctccacccaccacccttccctctctcctacagaccagcatgtagctctcagctattgctccagcaccatgggcactgccatgttccacaccataatggactaaacttctggaactataatctagcccccaattaaatattttcttttataaaagagttggcttgggcatggtgtctcttcacagctaaagaacagtgactagacagagccatttaatttgttcagaataacttcccattattcttcaagtacaattgcaatcatgaaattataaaccataattagttcacaataataataataataataataataataataataataataataaaatcatttatcacactcacaaagacagcaaagttaatatccaggctaaagttattacagttctctactctatgacagcagacacaagttccccagcggactcatcaccacagcagggagaggggtgcaatctatctaatcaccaatgcacctcaaagagacaggttagtgtcatgaagaaataaaaaaggacacttttatcttaggatgcttgttgagtcttgtgtaggcatcggaaaggaagaaacctaagtgtcttcactttagggaacactgccctctactggaaggtataaacagcttctatcattccttcgatgcattctaggtctacaaaatgtgcctgtcagttatgtggacctagtggacttgggtttcttgccaaattctttcagtttggtgcctgcagtcctgttcacctgtcccttagacaaatcaaactcaatctgtctaaaattgagtacattatgtgacatagacctgccttcaagcccacccagaaacacaccccaggcacagaactctccttcctctccacaacactcatctcactccccacaacattcatctatcccaacctcatctaagacaacattcatctagcctcaccttgcccaaagatggcattcatctagccccacctcagccctggccttactttgccatggtatagcccttctaaatgactttctaaagccctgtagctttccttgccttccatttagactttcaactggaatctccattctcccagagtgacctttccaaacagctgtttaaaacagctcccagaattctcagggagaagctccagccccttgagtctttcggaagccctgtcaatctggctgctctcaagcctgtgttcttggtatttctaccaccacacatgggtgtgcaggtggaaaaatgacctgaatcctccccattcatctccactatctagaatcccttttctcactaacatcctaactccagggacaaatcttccatgacagctgcattgatcatgtcactgttacaagctacaacatgcttgaagcaatgagtcatttgaaaatgactcatagagcacttcccatactctgcttggagagcttgttttcctgtccagccacaactgcaaaccccacacctccgcctcagctcaagaactccagcacttatttagacttccttttattctgaattagtttaaaggtggagaataagggaagaaagaggcatgagctaacctttctaaaataaaaaaaaaaatcagaagttgacttttaaaggggccagaggtgctgtaaagatacaggaagcactctgaactggcaagttagaaacttatcaccaagtatgtttatcagccgagtaagaaacctgaccagctacagttacagcagtagaagtggactaggagcttaggggacgccagcagtgctgacacaacaccaggaagaagtgtctcacataatcttcaagaagaaaacataacattatctagaccacatcctgggcaggcagaacagccggcagtagccctcccagagcagaaccatggcaattcctcctaccccaagcccacgaggctcagtcaaggttcagtcacttgttcaacccagcagcaggtgcagtgtgtatggataccaccagagcccagcaagtctttacatgctttctccaaggcttcttttcagctgacagagaggcaaagaacctaaggttacactatctgtcaaatactcagaatgaaactgctctgtgctgctaactaaatacaggatcaaatactaaccagctattaacactcacggtagagaaacagggatctggccacgtctgtccctgactccagcatctggaactgtgattctcagtgccatcagactggtattcctttgcattctttgatatttcatggagtctcattgctatcccaatattaagttgataattaattctgttccacatatgaataatcttttatgtacacatttcaaaataaagaaaccagtgtaataccctaactaaaatatgaatataacaccctggctaaaatatgcagcaaaagaaactgataatatgatcatttgtatttcagcattaacaatgttttcctgtgctgtagcagccgccatcaaagagcaacagccatggccctgagttaccccgtggctgcgggctcaacaaaagtcacaaggtgatcgacaacatcaggaccatcagtacaaatataaggtgacaaaaaatcatcagcaagcccaggctcaggtggggagggggagaggaggggtcaccaatgacaacaagttcgtgtgggacacgacccaggaggatgtgtggctttgtgccctacgagcagcatgccacgcagctgctcaaggtgtccaaggacaagggcatgcccaggttcatcagaagagggtggactcgcacaggtgcactaaaaggaagtgggaggcactgagcaacgagacggtggccacgaggaagaccagggtcaagaaggatcggtacccgtgccacaccctccccaatagatgtttatgctgaagacagacaaacaacaacaaacaaaacacaatgtttcctatgtacccagtggtaagacttgcgtaattcctagatttgaagatttgtgtaattcctagatttgaagatttgtgtaattcctagatttgaagggaaattagaatttttttttcaagacagggtttctctgtggagctttggagcctatcctggcactcgctctggagaccaggctggcctcgaactcacagagatccgcctgcttctgcctcccgagcactaggattaaaggcgtgcgccaccaaagccctgctcgaaattaagattttattccacacgagaaacataataatatgcaaagaagtaaaaatgcttcctataaaaactatgcctagtattaaatctactatcagattatttgtatagagaaaatctgtgaactacagtaaggcttttttatatgcaccccccccccccgaaaaaaacctgccacattgaacagaatgagaagcaatgacattcctaatggcaaaaacaagggtgtctgagtgaccccttgtgccttgatgtggaataataacattagtagaactgcattcaaacttggtagtggctctataggaccagctcctgggttttcaggactattctgcaccctgacaaacacccctggtacctcatctctagatgacatcagtcctgcccactcctcatgccaacaaacatactttcctgcttttgaagcatccccataaagatccaccagtccagcccagaggagcagttatccaaagcttgaatgagcaaagtaggaggcaaactgaatcagtccctgaagatccagggaccctgactctgctgaggtcgctgggctactctgcccccaggcagtgcagagtgcagagtgcagaatgcagaaagtacagaggtgagctgcttcggcccctgccttgggcccaacttccacctgcccactctgggaaatcccaccctggggtctacaggcaaagtgaatcagtccctgaggacccaggaacccagactctgatgagattgctgggctattcggcccccaggcagtgcagagtgcagagtgcagaatgcagaaagtacagaggtgagctgctttggcccctgacttgggcacaactttcacctgcccacactgggaactcctgcccaggggtctgcaggcaagtagactcggcccctgaggaccaagcaacccagagtctgctgacatctctgtgccaggcctgctcttgcccacctggagagcgagcctcggacctgcctgcacccaccttgagacccatcagagtattgaagccaattgcaaccacctgaagagaaccccagacccatacacaccaggaaaggaagtgacaccacctgcacccattggaagaagagatgggaagaccacaatataagaacacatccaacaacagggaaaccaatatgacaccaccagagtctagggactctacaccagcaagacatgaacatcccaacacagaggaagcagaagagagtaaccttaaaaacaacttcatgcagatgatagagatcctaggagaggaaatcagaaaatccttcagagaaatggaagaaaagacgaacaaaagatgtaagaaatcaaggaaagccaagaaagccaagaaaatacaatcaaacagatgaaggagacagttcaggacctgaaaactgaaatagagacaataaagaaaacacaaactgatggaatgctggaagtagaaaagctgagtaaacaatcaggaaccgcagatgcaagcataagcaacagaatacaagagatggaaaacagaatctcagacactgaagatacactagaggaaataaattcatcaagcaaagaaactcttaaggccaacaaatctttaacaaaaaatatccaggaaatatgggacactgtgaaaagaccaaacctaaggatactaggtatagaagaaggtgaagaaacccaactcaaaggtgcagaaaacaacaaaatcataaaagaaaactttcccaacctaaagaaaaaaatgccaatgaaagtacaagaagcatacagaacgccaaatagagtgggccacaaaagaaagtccccttgtcacttaataattaaaacaccaaacgtacagaataaagaaagaatattaagagcagcaaaggaaaaaggccaagtaacacataaaggcaaacctatcagaattacaccagacttctccatgaaaactctgaaagccagaaggaccagaatagatattctaccaactctgagaaaacacggatgccagcccagactactatacccagcaaagctttcaatcatcataaatggagaaaataagatattccacaacaaaaccagatttaaacaatatgtaaccactaattcagccctacagaaagtactggaaggaaaactccaacctaaggaaattaactacactcacaaaaacataggcaatagataatcccactttacgaaaacccaaaagaaaaaaacagggtaaatccacaatacaataccactaccaacaacaaattaaaaacaaacaagaataaacattcaatggtcacactcagccaggcaatggtggcgaacacctttaatcccagcacttgggaggcagaggcaggtggatctctgtgagttcgagtccagcctggtctccagagcgagtgccagcatacgtttcaaagctacacagagaaagcctgtctcaaaaaacaaaacaacaaaacaacaacaacaacaaaaagaataaacactcaatggaccttaatttcccccaatattaatggtcttaacttgcctataaaaagacacaggctaacagattggatatgaagacagaatccatccttctgctgcatacaagaaacacacctcaaattcaaagacagacattacctcagagtaaagggttggtataagatattccaatcaaatggacccaagaaacgaactggggtagctatcctagtatctaacatgttagacttcaaactaaaatcaatcaaaagagatgaagaaggtcatttcatattcatcacaggaaaaatccatcaggaagaagtctcaattctaaacatctatgctccaaatacaaaggcaacaacattcgtaattgaaacattattaaaactcaaatcacaaataaagcctcacacagatatagtgggagacttcaacaccccactctcaccactggacaggaccaccagacagaaacttaacaaagagacaaaggaactaacagaannnnnnnnnnnnnnnnnnnnnnnnnnnnnnnnnnnnnnnnnnnnnnnnnttcttttcagcatcacatggaaccttctcaaaaatcgaccacatagcaaacctcagcaggtacaaaagagttggaataatcccgtgtcttatcagaccaccacgctttaaagttagaattcaaaaacaacacaaattgcagaaaacctacaaactcatggaaattgaacaacaggaaattgcaccattcatgggtcaaggaagaaataaagaaattaaagacttgctagaattcaatgaaactgtagacacaacatacccacacttacgggacactttgaaagcagtactaagaggaaagttcatagctctaagtgctcacacgaaaaagctagagaatagccacaccagagagctgacatcacagctgaaagctgtagaaaaaaatggaagcatattcaccacagaggagcagacaccaggaaaaaatcaaaccgagggcagaaatcaataaagttgaaaaaaagaaaacacttcaaagaatcaatataacaaagagttggttcttcaaaaaatcaactagatagactatccaaactaaccaaaggcagagagagaacatgcaaattaacaaaatcagaaatggaaagggaacataacaatagacactgaggaaatccagagaatcttcaagttatactttgaaaacctgtactccacaaaatttgaaaatttaaaggaaatggacaactttgtggacagttatcagttaccataattgagctacaattacattggtactcaagacacaactaagaaagagaactacagaccaatatccctcatgaacatagatgcaaaaatactcaataaaatactggcaaactaaatccaagaccataccagaaaaatcatccactatgatcaagtaggcttcatccctgggttggttcaacattccaaaatctatcaatgtaatccaccatataaaccaactgaagaagaaaaaccacatgatcatctcactagatgctgaaaaagcctttgacaaaatccaacatcccttcatgataaaggtcctggaaagatcaggaataacaggaacacacctgaacaatatatatagtaagccaacagccaacatcaaactaaatggagagaaactcaaagtgtttcctctaaaatctggaacaggacaaggctgtctactctccccatatctcttcaatttgtccgtgaagttctggctagagcaataaggcaacaaaaggagattaaggggatacaaattggaatggaagaagtcaagctttcactgtttgcagatgatatgatagtttacataagtgacctgaaaaactctaccagggacctcctacagctaataaacaccttcagcaaagtgtcaggatacaagattaactcaaaaaaaaaaatcagaagccctacaatatacagatgataaatgtgctgagaaagaaatcagagaaacatcacccattacaattgccacaaacaacataaaataccttggggtaacactaacctaaaaagtgaaagatctgtatcataagaattttgagtcattaaagaagataccagaaaatggaaggatcttccatgttcttggataggtaggatcaacatagtaaaaatggcaatcttgccaaaagcaatctacagattcaatgcaattaacatcaaaatcccaacacaattcttcacagaacttgaaaaaacaattctcaactttatatggaaaaaccaaagacccaggataggcaaaacaaccctgtacaataaaagaattttcggaggcaacaccaacatccctgatttcaagctctattatagagctatagtcctgaaaacagcttggttttggcacaaaaatagacaggtagatcaatggaatcaaattgaaaaccctgacattaacccatacacctgatttttgacaaaaaagccaaagctatacaatggaataaagaaagcatcttcaacaaatggtgctggcatagctggatgctggcctatagacgactgcaggtagaaccaagtctatcgctatgcacaaaacttaagcccaaatggatcaaagacctcaacataaacccagccacactgaacttattagaagagaaagtaggaaatacccttgaacggtacaggagaccgcttcctgaacctaacaccagtagcacagacactgagatccacaactaataaatgggacctcctgaaactgagaagcttctgtaaggcagaggacacagtcaacaagacaaaatgacagcccacggattgggaaaaaatactcaccaaccccctatccgacagagagctgatctccaaaatatacaagaactcaagaagctagtctcgaaaacaccaaataatccaattaaaaagtggggtacagaactaaatagagaattctcaacacaggaatctaaaatggctgaaagacacataagaaagtgttcaacatccttagccaacagggaaatgcaaatcaaaacaactctgagataccatcttacacctctcagaatggctaaaatcaaaaataccaatggccgtttatgctggagaggatgtggagaaaggggaacactcctcccctgctggtgagagtaccaactcatacagccactttggaaatctgtatggcgattcctcaggaaaatgggaatcagtctaccacaagatccagcaattccactcctaggcatatacccaaaagaagcacattcatacaacaaggacatctgttcaactatgttcatagcagcattatttgtaacagccagaacctggaagcaacctagatgcccctcaactgaagaatggatagaaaaatatgtggtacatttacacaatggagtacttacttgttggaaaaaaaggcaatggggacttgaaattcacaggcaaatggatggaactagaataaaccattctgattgaggtaacccagtcacaaaaagacaggcattgtatgtactcactcatatgtggatttttgacatagaggaaaggattgtcagcctgcagcccaggctgccagagaggcggggaaacaaggaggaccctaacagagacatacagggtcccccaggaaagggggaagggacaagatctcctgagcaagttgggagtatgggaggaggggagagggaactaggagaatgagaaggggagaagaggagaggtgaggaagacataatgggacagggaggttgagttgggggaagaacagaagagagcaagataagagataatataaatagagggagacattataggtttaaagcgaaatcaggtactagggaaatgtcaggagagctacaaagatgacaccaactaacaatttaagcaacagaggagaggctaccttaaatgccttctcctgataatgaaattgatgactaattcatatgccttcgtatagcctttaaccagcagctggtggaagtagaagcagacacccacagctaaaccttgaactgaactgaaatccagatgcagagaaggaggactgatgagcaaaggggtccataccaggctggtgaaacccacagaaacagctgacctgaacaaggggaaactcttggtccccagactgatagctgggaaaccagcatggaactgatccagaccccctgaatgtgggtgtcagtgaggagaccttggaaatctatgggacctcttgtagtggctcagtacttattgctaccatagaaatggactttaggagcccatcctacatggagggatactccctgagcctagacacaagggggttggcctagggcctatcccaaagaatatgacagactttgaagacactcccatggaaggccttacccttcctggagagcagaaaggatatggttataggatgaatagggcattagttgggggaaggcggggaaggaggggagggagaggaacctgggattgacatgtaaaataattttctttcaaataaaaaaaataataaaaaatgttaaaaaataaaaaaaaatgagcaaagtagcaaatgcttaactgaggaaggaaagaatgaacaaagccaactttggaaggaagaaactaggacatggggatacacccccccccaaaaaaaaaaggctgagatgaagctctgaagatctggaccacaaggacctggtttaggattagcaaatgggtaaatgggtaaattagcaaatgggtaaatttgcaaatgggtaaatttgagtaagaggcaaacaaaatggtgtactgtacatgaacctaggggtgtattgtaccccacaaccctatatcttgcctctacaccccttatttcctgctatgctttaatgtgcacttcaacagactggctagcaagccctgcattttccaggttcccaacatggagcaggggcaggcatacctccttcagtttctacagctccagaaggcatggttggtctctcttctgtcttcgattcttgttcaagagcctacaagataaaggggggaagggtggtaaatcactgaaaactattttgggcccgatatgcaaaagaggtaaaaatcaccatcacagagctgggaaagctgtcaaggacagtatgtattaggcgaagaggtaaactctgatagaggaacacacagccagtatccaaggatgatgacaagaaaagtcggatgaaacccaggggcaagggtaaaaaccctgtcacaaattctcactttttctgctgttcataaccccaagtttctcaggcatgctgtgtatgaaccacagaaaggaccttgacacaaaaagggagaactgagtgttgctacacctaccctactggagtgtcctatacccacatcctacacaggtgatgaaaagaggagctgatgaggaggtaggaccacagtcagggtatatccagagtgaccaccagtcaaaaagtatgcaggctggcacagattgttcctggctggatccaagttgcagagccatctcaaggtcagggcaaaaagatgccctcttgtgatcataattgcttttgagattctcttggcccatgaaaatatgaagaaacataaaattacattaatgaactgaacagttaagcagcccaagatggtgtcaataggttctacaataaatcttcagcctcattgggtggaaaaagtatacaactaacatagttggtgaatcctaccacacaattaagctggtagattgagtgagtgcctcattcactcagaacatcctaagatcaggatatgtatccaaagtaccaaactacaaaggggaagtgggcaataagggttaaggcatacatggtgggctacctctgccatgtcccctataagaagtgcttttctctcttttgggccccatgagattaggaaaggactagaccacatctacaatggatgctaccaaggaagtatgatctagttagcttttattgtcaacttgatacagcctggagtcacctgggaagaggggatctcagttgaataattctcttgatcagttggcctatggacatgtatacaagagactatcttgattgatgattgataattgatgactgataattgatgtagaacggccaagcccactgtaggcagtaccatccctgggcaggttagatggacatcagtcaagagcattcgctgctcttccagatgacctgggttcaattcccagcacctgtatggtggcttacaaccacctgtaactcccacttccaaggatctgatcatattttctgacctctgcaggtatcaggaatgcacatagtatacatacacaggcaaaacactcatacacataaagaaccctaataatcttttttaaaaagtattttttggcacacgcctttaatcccagcactcgggaagcagaggcaggtggatctctgtgaattcgagaccagcctggtctacaagagctagttccaggacagcctccaaagccaaagggaaaccctgtctcgaaaaacaaaaaaaataaaaataaataaaaataaaaataaaaaaacaagaaagaaagaaagaaagaaagaaagaaagaaagatagatagatagatagatagatagatagatagatagatagaaagcggagtgtgagtcagtaagcagcattcctcatggttactgcctccaggcttctgccttgagttcttatcctaacattccctaatgatagactgacatggaagtgttagccaaataaaccccttcttcccacgttgatttggggagcagtgtttatcagagcatcagagaacaaactggagcaggtggcacctagtataaggagtgatgcttggaagaggagtcttcatacaagctcaaggcctgagttaaccatctgtccactgtttacccagggacaaccttgaccttgaacccatcttccattaaagggagttgccaagcctgtgtgagaagagggcatcagacaacactagtttctgattacaaaactaaatgtgaaataaaacacctaactttttcatgtaaatgagaggcataaaaaatttttattcttatggccgttttggaatacatctttaaacacttaaatttcccagttgacatattcattataggtcagtgctaggaccacatttatcagcacactgactaacacaaacaggctttgttaaaaagagatcatttaaaaaacattagaaggtacaggcaagctctcacctatcacaggtcaggctgcatatgtggaaggctctgagttcaatccccaacacaacacaataaaataaaacaaaaatatatacttagctatatttagaattctatacacatatgtagcatgagactgtatttttcaattctttaaatccttcactaagtttatttatttacttattttgtgtattgtgtaattatgtgtgtcgcatgcatgtgctgatgtgtgtgtgtagcagaggacaactcacaggagttgatgttttccttccactgtgtgtgtcccaggaaattaaactcaggtcatcaggtttggctgcaagtgctattaccttccaagctacttcgtcgtcccaaatttcttaacatttgccactacagtttggatagttagcaacagtttgacttttagtactgtggtggtttgaaggagaatggccccataggctcatatgtttgaatgcttggtccctagtagtggaactgtttgggaaaggattaggaggtgtggccttgttggagtgtcatacctatgccaggcccaatctgtctctgtgctctgtatctgggtctctctgtatctgtgattctctctgtgtctctctctgtctcctgcttatggatcagatgtaagttcttagctaatgttcccaagccatgctctccaccatgatggtcatggactcaccctcagaaactgtaagcaagcccacaattaaatgctttcttttataagctgccttgttcatggtgtctcgtcacagtaacagaacaatgagtaagacaagtatttattacaaattgtcaaggcattatcatcatcaactacaagacagagtggaaaacataaacattaacagctctgaccaagcgtggcttttgaaagtgatgagaagcagagttctggtgcatgagaaggcaagcaaggacttgtcaaggtcttatgattaagttctacagagctgtaggtaacaacaacattcccagaccacttaaaatgagcatgtctccttgaagggacggagtatggctgtggccccatgtacacagagcagccactcagatcatgatcatacagaaaaaaaaaaaaaaaaaaaaaaaaaaaaaaaaaacgagatttcagtacatatcagattcaataaagcttgaattatttttcttttccctcccctctcctttctcttttccttcttgtgttttgaaacaggtctcaatatgtagcccacactggcctaaaacttgtaatcttcctgtcttagcccccagagtactggaattatagaaatatgaatgttatgtatgtcaccactcctgggttagcatgaatatactgtatgaatactccatatgtattctcattaatatttattgttcacaattgtcaaagtgtagtatagacatgccaaataagaattgcctttgggggctagagaaataactcattgtttaagagccctttctgctattgcagataattactgttcagttcccagacaccacatggcaattcacaaccaccactaagtctagttccagggaatccaacatcctcttctgattccatgggcaccaggaacacacaggtgcacacacatacatgcaagcaaaacatgcatacacataaagtaaaaataaatggttgataaaaataatctgccttttgtttatacttacagtaacatctaaccatgtaagatatagcatgaccaattataaatttaagaacgtacagaagcatttgtcatggcagttggcgtgattggctttggatggcaagaggaatgctgaccttctccctaccttcccagacttcttgtttacttcccaagcaatgggattacaggagcaagccaccacacctagttcttaactggttctcttatttttttcatgaaacgaaacctcagaaacttgtcattcaactctcctgccattgttattgtagagcccactacaataaaatgatgtggcatctcattttattaatcccatacctttctcaaagtcagtttctcaaatgtgtgaaatatcaacaaatccagctgaaggattctgtaatgatacaaattcccagtgtgttggctgcacacagaacatgtcctgttctttctacttgagtcaccacatgctgcactgctctctgaacagcactcgcagggccatgcatgttgccaggctctatccctatggggcttctggggccagactcctcttgagaatattgtgcagcgtagcccagcatctcctggcagggactcatcaccattcggtacttcagtgagaagccacaggaatggtttagtatcattaaatgacaagtgcttgaagctcagccctcgcttgtatatactaaattgaattgtacatttcagaaaatgacacataaaatttcctaaaacccaatggggggggtcagactctgaagaacatatttcattttaattatgccaataaaattctacatgggatatgacaataatatttatttgctatgtaaatattttaactgcatttgtagtttaattatataacataaacacagaagccaaactatgatggtttctgtttctctcggttaatgttttaatctggttgaaaacctgttcagctgaggaaaaccatcttagaagtagatgtgcttgacacatgggaaaccacttgatctagacagggactctgagggcccctgagcactgtccactagactgaaccagattgtattcaaaacaagtttgcttactaaaagtgaaaaatttaagtattctttatatttgaccagaggccctcaaatccggtgtcattgccatgataggaaggagtaaatctctttataaaaggactctgttctcacctgtcctgttttaaatacaaacaggacagaagaaatcatcgaagtcataagatgctgtaaactgttttagataagaattagagccagacgttggtggcgcatgcctttaatccagcactcaggaggcagaggcaggcggatctctgtgagttcgaggccagcctggtctccagagtgactgccaggagaggctccaaagctacacagagaagccctgtctcggaaaaacctaaatcaatcaatcaatcaatcaataaataaataaataaataaataagaactgccaatgagtacaaagaaaacatatcatattagaatattagaattcagttgtgggagcctggtatggaggcacacatttgcagttcaagtacaaagatgtaaagatcccaagtgcaaggatagcttgggctacacagcaagaccctgtcttagaaaacaaaaccaacaacaaaagaaatgcaagcaaaacaacaatggactgctacttccatgccacctaaagctgtgctggcctccattccacttatccacaggagctctgacttcacatcatcaagttttcattaggaaaaaaaaatgttagctaccaagcaccattccaaaccagtacacagatcccacacacactaaggagcatgcaccatcgagcgagtactgcagtacaaaccttgacaagaaaggtcctgtcccaaaagtacttcctgaagagtttgatatctgcctccaacaaatgctcagcagtgtgattaacagtcagagtcaatgtttctgatgagtgaacgaactgcagacaggcatcttcgttgagatacagtcgggagaagcctggagaacggctaccctgaaaactgaaccgtcacaagtcaatccacgcagcttcacagatgctatcccgcatcctgcccagagattaaaaatccaaatggaaaatgatccttaaaagtcacttacacacccaattacacaatcgtgtgtaaacagatgcgggtcaagccatctttgtttttccactgagtggtggtttttaaaaccctatacatttttaaggttcctataaataacaaaacagtcctgatttttaagcatagaaatgtacctcactatttccctctccttttagtcagaaaagatatttctccctttaatggagctcatgtagaacaaattagctggcaaccaatagtttgttaggtgattataatggaaaacagataggatctccagggagtatggggaggtttgaatgtgacaaacaactgttaagattcctaacacactggtaccactgtattaaatcacttcctcatgcaaattagagcatgcataaatctgattaggtcatagtcttgaacacgttcattaacaatgaaacaatatacccaaactaaattcttgaatataaccttattttctcatctgtcttggctggctaagaacaactgtgttgttagttatacagctgttagttatacagcttcttgatggctgaaattacagcactaaatcagcatagcttataagatcatgtaatagtaacagtaaatatgcatcaggtgaaaaatattgatgttcatcatgtggtcacatgccaacagactgtccccagatccctggctttacagaaccagctctgcccctttcttcttctggcatgatctcattttgttaatgtttgctttacagaaataaaagagcctgtaacttatgatggcttgatttctaacttgtcaatgctacaatgctgtaggagatatgtgaattcactagaaatattactttctggtcttgaattttgattttacccagactggaggatgatacatacatagtgtattactctctccagctgttggacagtggaaaaaagcctcatcccacagtcacccatacagccataaggctacaaatctgatctcccacagtggaccatgttgcccagtgttgtatagaaggctaagtacaataaatgtattggcaacttgggctattttcaacctaagataggttcacaggacatacctccttttaaaattgaggagtctgaggtgacttatctcctcagatggagtgacaaaaagagatctataaagagcagctctactagaaaacacagtcttcacactgactccagaatcttctataaagcaagcccttatgccaacaagccattgaaaagaaaggatcataagcctgagcaatagtagagctgttgttaatttagaacacggacactccgtcaatgatcatatgatcacataatcttgtagccagaattgagtctacttttaattccacctatgagtggatctgttaaacacataaacttttaaaacataccgtatcttctggtgctagaaacaggaataaggtacaaagcacccagcagataaaggagtctacctccaggagggaacactgcaccagccaccataactcagttaaaggacatgttcttggctcagtctttgtagccaagaaaatagggttgtgttcataaccaaaggaaaggacaattccctttggagaggtttgtcccttggttaatgactgtttgatcaaataaggcaggggatgagaaagagaaagttctggtttctgcctaatggctacttaggcatcaaattaccattaattaattgcatcaaattaattacattgagttatatgacccaaacaagaaaaaacatcccactaagacacaccatgtaataatactccaacaatatttaaaatatttgttgtaattttcaatgtactgttcaatttataatttgtattttaccatgtcatatcaaggcaattactatatatggctccttccttcataagttagaacaataattcatctgaaccaaaataatccactggtcactcactagaggtaatgagaacattaccgacacagacaacttcatagttaccagattatgtctcttgcagtagctcaataaattctagtgactactcctataggggttgcctgttagtcttacagtgaaaattatggcataggcattggactagaaatagtccaataagtagaccagaaatgttcccatctctcacatgattcagaagatagccaaaaaagtaaatggtcatgtctgtataattataaattgtggttattactaaaattaatcataatcataaaagaatataacttggaagcctttgctgaggaaatgatgttaaagctgaagcctgaaagatagtgtagcccactgcttggcaatccttttttcattatcttccctgtgtctcccttacaaaatactcccaacaaaggtatccacttatgctagctaagcatatacttgtactacatgcaagaaggctagctgaaaaaaaaataagtcaacattagcagatggcttagttattctcattctcccataatgcttgtcaggctttatagacatggttaagaaaggcgctatcaagcaattgaactcactttgtgatgtcttccaccagtgtggagtgtccaccttgcaaagctaagtctaacggtgtcgtgccctcttcattaggtagctccaaggccttgactcccccagggagacacaagagaaagtggaaaagcttaggcaggccccatctcacagccaggtgcagaagagactctctgtgtagagatactgaagaaaagggaaaacgtaatgttagttcctccattcataaactttgttttgtatattttattatatactggatataacagaagcctcagggctggaaggaatcaaaagcacctcatcttgacctcatgctctatgaatgatgagaggtcctgggatatttctggaggtcagggagccaaagggtaccggtgctatgatactcatgactggtactggctctttccatccactacactacatcctgctgccacctaggatgcaggaaggaacatcaccagaggatacagattctcaggaaagatcattctttagaaacacactcatcagcttccaaggtatccactaagaagatcctgccacacaggcaaggcaggctatcaagaccacaggcacaaagaaacctctgtttccaccattcatcctcagagcctgtccttcatgagaggctgtgacagaaagcagttccttaagtgcagagcacttgtgaccacagtctgtccccaacctcacagtgctgtgtgtgcccagcaattagatccctgggaacatctccacactgccagaggcaccctggtgctatgcctttgcagatggccctgaacaggggtccttggcagcctcatgctagtttccactgtggtgtttactgttgtgcgttatgctcatttcctgactttcactgtatgggctgccaggcccttgaagattttccttcttaacagtagctagtaatgcataaagccattaaaatacttgcagagcttaaaaataattagctattaaagtctcaattgtgtgtgtatatttacttcatctgtaatttgtagagagtttgtacttgtctctctactgtaatagcccagtacctaagacacaggtgattcatgacacaaactgtattgcaaatatgcaaaatataaaaacattttcttacattataaaagctagacccagactggctgtgggggcactttcctggaaacccagcactcaggactgtgaggcaggaggatcacttatgtccagaagtttgacactaatctgggcaacacagcaagatacagactacatacatacatacatacatacatacatacatacatacatacatacatacagggctcctaaactttatatgcatggtcacactttaaagacaccttctcctaacagcctaaattcgaagagctgatcactacagctctgtggcgataagcagagcagcacacagtaggggtctagtaagtaataacactgaccatatccataacccaagagagctagacaatgaatgaaagacccaacagggtagggaccttgtcttctgccctgtgggatcctccaagcatcacagcacctgacacacttgctaagcatttacagattacaggaaattacacacaaatagcaaacccctgtggaagctggcgtttcatctttgactgtgctactgtacacaacacccatcactctctgttttgtctcggataggtcttaaatgaagtctcacaacagacactgtggactcccacttggtactcccacatacaactagggcattaaggacaaaaatgccagcttcccacacagctcactgtccacaaaaccatgatcttattgttccactgtcttcattaacataacttcactattgccagactcttgcccaggcaaatcagtgactgtttactgcagaaatttcccagcagactcatcaacctctcggcaggaatcaccaatggagagtgcagagaagccctaaatacaattttaagctatcatgatccttgccaactcctaaggaggtccccatctaaacctgccattccccctcactatgactaaccctactaccacaatgaaaaatctttattaaaccaagcttcaatttcttagtgaatttctgtcttgccatccccagtccctgaagccactaaaggtttgtaacagtgtcacctgacttaatatgacagccacaggcacagctttgttatatgagggtaaggaatatttgtggagggagcatggaacaaaatcccaacacaacagaaataaataccccactgtgcatggatacaaaataaaactgcttcttttacattttcacagatctatccagatttctcaaaatccacatcaaagactacagggctttagatttcaaatacattaggaccgataccagagtccttatcacagtaaagtaccatcgagtgccctgtatgctctatcatttgtcatgtgacatatagcacatacccctctatagtgaaacagcagcccaaataccaaaacatctgaaaacagacccacagccctggctgcatgcagttaccatgcatccgtttaatatgcttcaactcatctctatgaaaaccacaagactcgtgttggcttttcctctccaggtgctggaaactcaacccaatgcctcatggacactaggcaggaaaggtctttcttgtatccttgaagttattaccattgcacttatttaaacatcatggctatcattcttagcaggttccctgcaggacaagtctgacaacatttgtacttatttttcctattttaaataataaccaggaagagacttgttaggatcagataacaaaacaagcacacacctgcacatgcatgcacacatacactgaccagcagaggagggccgatcatcatgagatactgagcagccagccacactaaatggaatttttacaccacagatcccttctgaatatggtgagaaatgtcccatgtttgcacaggtcgaaatttcttccaagaaaaatacaactgagaaacaaacaatatctgtctaaagcagtggagttcaaacagtagcatttggtaaaggcaagcatggtttcagtatgtgaacagtattccttagtgtctgctgcaatgttctaaaactgggtactgttgactatattcagctgactaagaagagtgagtgtggggccttgtttcctccagtagcagaaacttccaggcctgtctggctagtcccaggcatctactgtgttttatgaggggcagagggggtccatcctcacatatcaaatgaaagagaactgtaacaatcatgcagctcactggtcctttcccctagcctcagaagtccttcttctggaagaggaaggaggatggaaggcagggaaagaaggctcttctgatggtcaaagaaagcacggaataaaattaccagtgttaaagagagagtactctcattcagtataaagtccagcatggagaagaaggcaaacagcttgaaataggaagcatcgtgacatatataaataattctgcttgttagaaggttcagatttcttaacagcagccaaaaaaaaaaaaaaaaaaaaaaaaaaaaaaaaaaaaaaaaaaatgaaatgtgagaagacactaaaatggggaaaggggttatacagtttggcagaggtagggctatttaattaaaatgaaaaaaaaaaaagaaccaaataaatgcctcttcctgttggtttagctagtagcaggagttgtctgaagttactgaaacagaattactaataattgctctgatggcacacattaaaaggtctgacttctaacatcctgggaacacaatcatcccgacagagagaaactgaacaggctgtgactttcaattaaccactcctgttttggaacggggagggcctatctgcccttaacagggaacaaagcttgattcttacatacttcactctgtgcagcatcagtttcttttcttataaaatgagtctgacatacacaaaaaaggagccagtaaatcccggctcattgccatgaccaaatatccgacaagaagcaactcatgggaggaaaggttgattttggcgcgtggtttgagaaggcacagtccttctttgacaggagagtgaaatggttgctcacacagtgttcacagtcaggaatcagaaggaggccaccgatgctcagttggctctccctttccccagcccataagaaggaagagacctgcattcagggcaggtcttgtctccttggttaatcctctttggacacacccaaagacttgccttactaatgcccagtgtttcttaacccaatggagttgataattgaaatgaaacaccctaagtccactccttctcaacttgatacccaaacaagtcacttttaaacacaaacattccaactgcccttaaaggttcatggccatcttataatttaaaatatttttaatccatcttttaagtttaccagttccaccattgttcaaaagaccaaagtccaaaatctcacctgaaactcgaaaatctcttaactgtgagcctgaaataaaccctctaaaatattttttaagttaaatattttcagtatacagtggtacagaagtaaaaatccccattccaaaatggaggaatgggggcatagtaaagaaatatcagatggaagtaagatgggaacccagtaaagcaaatgccacaacctgcaggctcctgcccagcatctgggacttataacaccataggaactccaacaggtttacatagccctgctcctccagatctgttcctagggcacatgtggcctttctttaagacttctgtactttcttttatactgcagctttacactgtagatgtccaatattttttgcatgcccaatatcctgagaactccattgcaaatttggctcctctttctcagctttacacacccttgcaggtaacctgcaccaccacaccatgcctggctttagatgtattctggaaccttggcaaaagcctacatgacaccctcactctcaacattgtgctaggagcttaagatgtagcctggccctcctgcccaaagttgcctcagcttctaaggggctgatctctgtgtgtcttaaaagtcaatcccaggaatatatttgcataggcaatcctggactttcttccctattgtcctggaggcatctttcctatcattccagtacaaagtccagggcttctcattaatggtgctaatctctaacatcaaagccactttgtcccaaccaagctcctttcctcctcaacaaactgtacatttttcatctttctgcatgttctctttcattctctctccctcccccacctctctctcattttaaatcttggcaaatgtgagtagtaaccatgtcacatcctgaatgttacgccgtcttccaccaaaaaatgcagttcactgttttttaactcagcctcactcaaattttcaggacatgggtaagacagggctttcaatttagtcattaatcctctctggaaatgccctcataggcacactcaaagttgtgcctcattaactcctgagatgatttttaatctactcgagttgacaatcagaattaactgtcacagttccaaagagaagtcagtccagtcctgactttatagtgagcaagatgtacaaaaaacagcatatactgaggggacttacagatcatctaaggcaaaagagaaagaacagaagatgttttaagaaagtggttttactttgcagtcagtctgcatgtggaaccagtagtataactatacatacctttcaattagcataatattcagcatggaagatttaaaacttaaattgccaatgtaggctcatcaattataacaactgtggagagtagaagaagttacaaatgtgtaaaaataaaaggcatttagaaaattgctgggctggtgagatggctcggtggctagcagcatttgctgacaagcccaaggatctgagtttgattccctagggcatacatggtggaaggagagcatctacccctctgatgtccacacatgtactgtggcatatgcatgcattgacacacaagtaaataataaaagataaaaataactaactaaataaggttccctaaaagtaaaattcaaggattttcctatgagatgcctctatatccatgtttattgacacactactcacaataatcaagatacagaatcagtctaggtgcccattaacaaatgaatagaaaaagaaactgtcataagtacacacacacacacacacacacacacacacacacacacacactgatacccctaatattcaagtaccagcaacctagaacactcgtattatgattagagatacatatctagaagattcaatcttgaagaagtcagatgcattctccaaagccagagaactatgaattgaatcagttttcaagaagactagaaacactaattaaaggcgtataatatatattacttgattttaatatagttgcattttattaataatatttcagtatcattcatttgtacatactttgttggtctttgtagaaggctttttatatggccaaaagaagaattaaatcatgttctttgaagtaaatgggcaggacaagaaatcttcatgttaacagaaataagcaagtctcacacagacaattattgttttctcacatatgtggaatgtatgggaacatgttaaaaggacatgaaaataaaagagggactattaggatgtggaaatgaattggggtgaaggggaaggagggctaagaaaggaaatgaggagataaatatagtcaatacttctgaaaatagccaatgctgggccatggtggcacatgtccttaatctcagcactagggaagtagaggaaggcatctctctgtgactttgaggccagcctggaatgagttccagggcagccagggctacacagagaaaccctgttttgaaaaaccagatagaaagaaagaaagaaagaaagaaagaaagaaagaaagaaagaaagcgagcataaaaaatgtctgaacactcaagaaggccctccccagaacaaataaataaggatatctgaagggagatgagcacccatgtttcctagagactctaacactaacccagagttagggttctgcctcttaaagccagtaattgttaggcaaaatacatccctaaggtttgccttctagagcactgttttcccaatctgccctgaagaactgtcatcttctaaaaagaatattaccaaaggacaaaaactggctacagttttctgtgagtttaacaagttctttgccacccaaggcgctaactgctaagccaggaaataggcttaaactcttagcaaaatattataattaatacacaatggggatgaaaatctagaagtaaatgatattttcaaaacactaataaattcagaagctagagttcagaatgtgctataactcctgagggaagccataggaatatattcagcataataaggttttgaagaccaatgggctttcattcacataaatctaattcattaaaacaagttctattcttatttccaatactgcacaattgtacaggtctcaacttgtgctcccaagtcattcagcaaacaaatattaaataatcgaatttctatgtgccaaacccaagtgtagatgaacatagttcctcctggtgaacagcaaacagccatttgtgttcagaataaaataaaaggctgacctatagaattgttgtctagtaaactagaattctaaggcttagacataaagagtgtatgaggaaataagaagactattcagctgacaaggaaatgtatctacatgtccaacatacgaggtatcatgacacagaagtttacagatgtttataaagtgccaactatggagagcaaaatttgaggaaactattaaccaacatttacatagaaagtaaaaagaagatttggcatggacatacacaggctctgagatatttgcaaggttgtcagtgaaagtaagaaaaggggccaggttgtacagcattttctgcccatgcagtctgttcagggctccggtagcgggtatacagccagccttcagtaccaaagatgggaggctggtgaatctaaagtagaaatcacaactataaatatgcttatttgaaaaaaaagatacagagcatcaaaaagaacagatgaccaacatggcagccataggctgatcataaggccagaaagaaggcatggagaggcattagcacagtggcaggccatgcttgcctcaagctgcttttctgtacctaatgcattcacattgcaaccacgcctaataatctctggaaacatccatcacatgccatcattcctgaaaatctacattgtctgtttacaacttagatgggtttggcatctcactgaggatggctgtattttggcttctggaactataactaaatagttgaaacactaaaaagtctattagagctccaagatgaaaacctcattttggctttcacatctagatacattccaaacagaaacacacaatgtgggcaatagtatcaggttgtaagaacccagacacaccttcaatagtgtaaagggggatggatgaaaggggtcagggcctggagttgagcatttacagagttccaactctggggaaattgccttgtctgtaaaagggaaaataatatcaagccagcttactatctcaaaatatcagaaataacatataggtcagggttcccaagaactacacatgatcttttttaatacgagaaatcacagtgtactgtcactaaatagatatgtggcgtgtttggaaacagtttttctctggttatcatttaaaaacataattgaagggaactagtctccggcttaggatgcactgtaattgcatcagtactgtgctccagatgagccattaagacaaattgcctgtaatcccctgactggggctgcaggcagtcattaggtgtgataagcaccaattattccagaccttctttccagactatgcaatccattttttctctcactggctaatgtttcttcaagttcaccatctattcatggtgaatttgctcaaagtttctgtgctcccctcacacaacaggtgagtggaattctcagatgtgtgccctgatgacctttcaggaaccctgctctttttaggagtcaaatgaaaatgtaatgcagttttcactgttttactaataagaaggaagtgtgggtttatcttgcaactgtcctttccaaggctgcagcagttgtttcaattcaagtacaaccaggaaattagccaatgaactacagctgggcagactgtactcattgccctggtactagatacctgagccttaggaccctgttcctaggttaagacatgttaaactttttttttttttttttttttggttttttgagacagagtttctctgtgtagctttggagcctatcctagcactcgctctggagaccaggctggcctcgaactcacagagttctgcctgcctctgcctcctgagtgctgggattaaagctgtgcgccaccaacgcccggcccatgttaaacttttgaggtatgaactgtaccatcattgagcgatttttatccacctcattcagtgtctgagacactgggaagggagagaaagaaggggagtagaatccaccaagcaggaagtcagtagcaaagtgtctgtataatcagggtgaggctggggacgttgggaagacatttcaaaataaatttagacatcgtaccctaagcagaacagggggtggaaagataagagcccgagatggtgggtgactacaatgaagtagtgcagctgcacatatgaacaatgtagctgtgagagcattcaccaggcctacacacaacacactcaagacagagaaaaccctgatatggaattggggaaatccgcaggaagtcccatctctagctgaatgtagtggtttggaagaaaatggcccccaaaggcagtggcactattaggaggtatggccttgttgtagtgggtgtggtcttgttggaggaagtgtgtcaccgtggaggcgagctttgaggtctcatgtatgcttaggccatgccctgtgagacagttcacttcctgatgccttgggtcaaaatgaagaattcctcagtatcatgtctgccatactcccagctgccatgctgccttccatgataatggactaaacctctgaactgtcagccaccacctcaactaaatgttttcctttataagagttgctgtggtcatgatgtctcttcacagcaatagaaaccctaactaagacaatgaagatctactgacaactgctagctaatgagagacttttttttttttttaaggatatgacctcctgttaaatcaaccatattccaggagaggaccacacacacaggaatatttagatagcacaaattggacatgaaatagggtaggatggatagggaggtaggaggggaaggagttggggagggtggatatgatcaaaatgcattgtataaaattcccaaggaattaataaaaatgttgtttaaacaaaaaaaatccctaagaaggaaatggaaacttgccggaactcataaaagtatgtataaatggctaagttttataaaatgtaaaatatttctcaacagaatttttattttatttttaaaaaggagccatcacagacacgtttatttcatgcttatgaggtctctgtgatgtcagtgttaatagttctgacatgttcccaattattcaaggtcactcaggaatcaagaagagcatcaagaattgagaccccctttcttcctccaaagctttagctagttcctagccattattcctcccagaaggcaaaggcttgaagtggcctcaactgcagtgtacttatgaagggaaatggattaaagccaacaataagaagataataaaggttaacgtttgaagagaaacagatttatacaaaatgattaaaactccattagtaaagaatcaggaatggatttatttaatactgtttatgcttatatctcctactataaattacagatggaaaagtgagaattacggaggggaaaaaaaatctgcaaaacaataaaaagccaaaaatagacattttaaaagagaacacaaaaaggtagaccccataggaaaccaacaaattgaaggtggaaggaggatataagcagaagtaaatgagctatacaagctctaaggactcaggctgatacctagtttcaggctttcaacacacacacacacacacacacacacacacacacacacacggcaaattaaagcagctgtaattacaagagtgggcagggagcacagatatgtagaaatacagggtaagattacaaaagacttttagctttattttttaaaactttttaaaagatttgttttattttatatatagggatgtttgacctgtatggatgtctgtgcagcactgtgtgttcctagtgtccattaaggccagaagagggtgttggattcccttagactggagttgtggcagttgcaagctgccatattggtgctgggaatcaagtctagtcctctggaaaagcagccagtgctctaaaccactaaacatctctccggacctctcctttaggtttgtagcatacagcttggtatgggttcatatccataccaaggctcctatttgagtgaacaaaaggctattaaaagtcactggggtcaagtaaagggaacttgagcagagcacacagctagctagctcatgtcactgccagagtctgctccacccacttctcagtctctcccattcactttctacaaccactgtgcttttgaccatcaaagcctggtagttttacaactcatatgccactttttttttaaaataaagcagcacaagaacagtcaccatcatccaaatcctattaagaaatgcaaaaagtatcagaagttttcacctttttcccccttaaaaaataactataaaatgattccttggctgctgtcgttttcaagttcaattctaatcccatgtgtgcagtcaaaagctgccatgaacatcctgtgtatttgggtgagtccaagagcaacgggggtggagatgggcctggctagcagaggcgaacttcagaggctcccagggtttggggtcctgagggaaacaccagggtagggcattcaaaaataagattccctctttatactctctctttttcctgaaaattataattgggagagacagtgacccaaatacacccttacgttctatttcccagatgggagaataccagtgggattctctactccaagtctaaggtccattgttgccagacagaagcaaagtttcttaaatacttcattactttatatgtatgagtgctggcctgaatgtatgcatgtgcaccatttgtgtgcctggtgcctgtggaggtcagaagagggtgtcagataccctggaattttacagacggctgtgagccaccatgtgggtgctgggaatcaaaccaaggtcttctgcaagaagagccagtgctcttaacccctgagccatgtctcccatcaggagacattttttaaagaagagtttatgatgtgtcttcttcttgaaggaaccatttttaaaaaagagaatgggcccaagaagagccaccaacttaagctgcaaaacaaatccaaactatctgaaggggacaacagttcttttcctgaaggacttcaggtctgcactgtattcttactgccaggaactctattccttgaaaacctaaaatggacttggaagacaatgaaaacatttttaaattaaggatttaaatctttctaaaggatacctacacacaaacctaagcagtgcgaaataattgtatcagttagacatagaaattcgccataggcacaattccaaagaacactgtcccccatcattagtattcaccctgagggttaccttagcaaccaaagggatagaataccagtttagtgtgtcagaaaagaatgtgtggaaatgattgacccatagaaaataccagaagcaacagaaggctagaaagcaatactgaatatatacaaaattactttaaaaaacaaaaacaaaaacctatccaaaagaaacacacaagccaccaggaccaggtgtttcccagttttccacaatgcactaatttcaaaactcagaaagaaaataagcagaggaatttgtatgttggactaaatcttgcttgtatcggtttcctacccactggtgtttcagctcgtgccattgaaacttgttggctggtacaaagctttgggtagaatgacaaaacagacaggccccatgatctgcaggccaataagcaagcctcatgctccagcactcagatagggacctcagtgaaggtagcccagggaagggcaactgcactggagcttcactctccttccctcctagtacactagttactaggatgaagggggcgcagctccatcccaaactcatcccaatgtggcttcctgcaggttacaaggctctttccatgcaaataaaaaacaaatttcctctgcaaacgctgctgaccatacatcccctttctctggctgcctagaagaaaggggatcggtgcatgtgacatggagcattatgtccatgtgtgaatgctgatggttaagacagattcacagctgctgaagaacccttaatcttacaaactttcctctgaagccctgtgggctttgcatgctctctcattagctgcaaagcacggagaaccgagaattcttcagaggatgttaatgcatgaagaccctatttagcagagcatagtcatgctaactgcccatctccattgtgatagcactgtgttactttccctgcactgggcatggcatgtgtgcttcatgacaacgttcagtttttcctttaagttcatgctgcaaccattttttattcaaacaagacactgctcaaacttgccctcaagaacatgtactttgtgactggtaaatcatacctttaatctctagatttgcatttaagtctaggatgttgtaatcagttacagaacagattcttaatccaatcttgcattaaagaattaagagataccatgctctaacctatctccactgggtcctgccaggactaccaaccagccctctttgatgatggatctctacacagcaaatacccacagcctcctagatacttgggctgtgtttaaagccaacactgccctgaagaaacattgaaaggaccaattggcttatcttctgaattccctctgtaggtagaataaaaacaggaagacagttggcctctttaaacttcataaagcaacttcataaagatcaaactttgttttgttggaaatttactattttcccctgcagattcaacaccatgttgaatgtattggtggttgttaacagaacccatgtactccatcaggaacagaagaacatctgcccagaagaccctgaagtaagtggccatgtccatctacagtttttcacaataataatttacccttatgggctggagagtttttgtgttaatctgacagaagccagggttatctgaaaggaaggaaactaactgagagggggaaatacgtccataagatccagctgtcagggagggcccagcccatggcaggtagtaccatgcctaggctggggttctgggttctataagaaagcaggctgatcaagccctgggaaatgagtcagtaagcagcacacactattctatggcctctgcatcagctcctgactccaggttcctagcctgtttgagttcctgtcctaacctccttcaatgaagaactacaatgtggaagtgtaagccaaataaacactttcttccccaactttcttttggtcatagtgtttcatcactgcaatagaaaccctaactaggacaccttacaaagcaaaatcttcaatctgccaattaatgtgtatgtattaatatatgtgaaaaatactatttatgtgtcctttttaaaagaaggagtccccccacacacacacacactgcaagagctttaattagaaggcaagctgtatctctcagtaggctggcaaagaagtaactatgttcacaaagccagtgtcattagaattgaggtggccacatggcagcctcctcctggtgaagcctggcttaccagccatccctgtcgggcttctgggaacacaaatgcagggaagccatttggttgagcaggaagggaagcttcaactcaaatgttatctgagcaccaatcagtgagacattagaaaattttatcccagttaacctaattgtctacattataccaatctctgcaaaaacatttctgtcaaaacacaaacaggcaagaaacccaaaacaaagcagataaactgtgacatcttcttgggtaattctattacttcactcagcatcttactgcaaacaaggagttcaggggccctgcaagagcttctatcataaaagctagctcacataagaaatgggtttaatcttatgaaatagaagcacagtttgatagaaggcctgaagttaaataaaacctggggcacttccttctattgtatgtataataaggttgtactatgactgatgatatgtaagatagggaccaagatgagaccctgcttttctaaggggtgccacgcttcactcaccatctctccctgacaaccatcaaaagtaaaatgtgagaatttaccacaaaagacagaggaatgcagtaatgtctcatgataggtcttgggtcggattatttatacaacaaagctattatcaaagttaactaacactcctctgctaaaataatgtttacacctaaagaaatcattaaaaatggataaaaattttgaaggataaatacagaaaattttagatgtttctgatgggtactaaaatagataattgctgaatggtttgcagggccctttaaaaatactaaagagaacaacaatgtgatccagtgattccattgctgtatatgcaaaggcaataaaatcagacagctagagaagcatctacattctcatactcatgacagccccactcataagagctaaaaagtaagcaacaagtgatgaatgaagggagaaaacatggtcatattcaaaacggagtactatccatccataaaaaatgaaaccctgtcacctatggcaactggaactggatggaactggagaccattgagttacagaaaataagccagacacaagcagaccagtaccacctgatctcacctatatgtggatctcacagagaactgtcatagaaactgaatcagatggtcaccagaggctagggtggtgggggaaatgttgatcagaaggtgttacattacagctagactggagcaaagggttcttgtgtaacagcaactgtacatttcaaaaggctacaagaaaggattttaaaaagttttaaacacaaagaaatgatgactgcttgaggttaagtatatttaaccaatttaaacattacacaatgtacacgcctatcaaaacagtactcggtgataggtatatttttatgcctatcaaaacagtactcagtaaaggtatatttttatgtttcttcatttaaaaaagtgaattgaaaacacaatgactaggaaggaaactggattctgcttatgactgatgtccccaccaggaatacaatccgaattctcatgggcccaaccctcagcctagtccttacgtcatcgctatactggcaaaggtcaagagaccaagaaggggattctgagaggagaaaacaaaatcaagttggggttgagaaggaagacaaagaagaaagagggcaataggatacatgtgacatagaaacagtggtcactgggggtgaaggagaccaatactgtgggcagagggctcggaaaggctagtggggtcagagaataacaagaacaaagcactgcaaaaccccctaatgaaacacatttactgtttgtaccagttttgaaaataataatatataaataaaatatgattcatctgtgaaatcccaaattaaatataaagtgatctgcacagatcccacaggcaggagtcccaaggttcccaggataagtatatcaccagacttgaaggtacttttgtcaactatggcattaggaactatttttccagatggtacaatgtcttactatcaaaaggaaaggaattgtcttcctttttctcttatccaaaaatggatctctagacagtcttgaaaacagcagcaggacaacagttggcagctacagttctctgaaccttatttattatgtatatctaccagaaatacacacccaacattgggaaatcatacacacgcactactgtaaattcccaggggaaccatgcacacatactattacaaatccacagatgtagaaaaccttaaattctgaattttgatgtggaaaactaaaagcagcaagtatgcaatacaaatttctcttcggaggctcacggcttaagcttgttcatgtgcaggctcattgctagttgatactcatggattcctcttatccaaggtctttaaaaaaatcagagccaggcactggtggtgcacgcctttaatcccagcactcaggaggcaaaggcaggtggatctccgtgagttttggccagcctgatctccagagcgactgccaggataggctccaaagctacacagagaaaccctgtctcaaaaaaacaaaacaaaacaaaaaaaaacaaaaaaacagaaacaaaaacaaaaacaaaacaaaaatcagagacattcagaagtgcctgggaaggtttgtaataattctgattgaatggagaaatgaatatcatgtctggttatagataatggcctcagtaccctgcttataaaaaccatagccatcacttacagtggtacagtacactcaatctcacccacgatcaaatttaagccaattgtaagtcacacccaggagtaatcagggatcaaattctttgaagcagcatcatccaaccacaaagctgaagtcatgagaggaaagcagcacattgacaacgtgccatgtcaagaaaacaacatctctggattttcaacaaaattacatcatttgtaatcaccttaagaaacagctactggtgggctggtgagatggctcactgggtaaaagtgtttgctgtcaacctggttttaatctgtgggatccagatggcagaaggagagaaatgactcttgaaagttgtcctctgacctccacatgtgcacaaagccaaccccccaaacacaatctaaatgaataaatgaaagcaactttttaaaaaggaacatctattaagcagttttccttcacacccaagtgggtttatatatgactcccatagctctacatatatcatagcactggagaacaagaattcattcacccttagtaattctaaaagttagtgcaaatgtaacacaaaggaattacacatatctgaggaagtggaactaataattgctgtagtttggccaacatgcattattcacatgtatataatgatcgcagtgtaccctgtagataattacaatgcgtgtcaactgaaaaacacttttgggacagggtctctgtaccttattctagctcacctggagctcactatgtagagaccagactggcttcagactggcaaagacctgaatccactcctcagttaaagtttttttaaatctataaatgccctgagggaaactgactttgtatgtatgtgctaatgttcccacttgcaagtccatgtgagtgtgcatgagtttgtgtgtgtgcatcagtgtatatgcagtcatacatttgtgcctcgtgtgtgcatggagaggccagagtgttgcttttcataagtcaccatgcattgattttttttaagacagtgtctccagttagagctagaactcaccaattcagctagactggctggccagggagcccagagattttcctgtctccatcttaccagtgtagcgttacaaatgccccccctttttaaatgtgggcactagagacggaacttaggtcttcaagcttgctcatcaagcactttccactcagccatctcatcttccccggtctgactcttatgttgcagtcgttgtttgttgttcatcagttacctttctttcaggatgcatctcttccaaccattacaaagagccttttttatcctttcctatttggataatggcaacaatgtctccttctcatggcatgaaactggccaaaggaattagagccacagtccaaagccacaggctcaagagccagccataaagaaacaatatcaccaccaccacagacaaagcccttcaatggtacctcctcagacctcctgggacccagaagcatcagccagccagccgagagatgaatggctgaagacttcagagaacccagccacataagagctaatggtttagctaaaaggtgggaagaaaaatctacccagagaaacagatggtaaactgtaaagtacattcttgacttgaaacagaaagcacacaccgcacatctgagttttctgacagacctaccttcaagtgaggaattccccaggactgtccagcccaaaggcagttccagttggctcagagccagcaccagttcttcatccaaggcaggcagcgcttctgccgtcagggcaaatggggttagcagcatctggtgactacaggccgtgagtcggtcagcctgagtgaccagtagacgagccagtcggcaggccatattgtccacataggtcactgagccagagcccatggtcactggagagtacccttccgagcagagacacacagacaccatcaccgtctcctgaagccagtggcctagatgacaggatgacaaacactttagctcatgtctgaaggagacacacagtagccctgggtaggcaacactctccaggggtcaagtagaaagtaaggtgtcatctctaaataccacgatcctggggtcactccagagatgatatctttttttttggtgatgggttttaaatgatcctttggaacttcagagtctcttcccaccaaccaccgtcctttgccacacttcctttcccttctacctaagccctggattccagtctgccatctgaagggtcttcactatttctgtcctgctataaacagggtcacacattcttagccatttattgaggtaacagattttttaaaactgtatcagaaatatatacaagtgcaccctaattctacagagcggctttgaaagtggggtgaagaccccttaactagactctgtgtgcatgaacacattcaacaaaaagcaggagtttcccagggccccctccagaaagggcccctgtgtcctgtcttctcactacttccagtgtggctgctcaccctgctccctgctctccttacactcttctttgtcttgctttcccattctgctaaggttggcgaactgctgcccagctatgtgtttttttcctttggtagaatttccaagaagtcaatagcttccaacccctgggaccatatgatggctggactgagaagagtccctgaacttcccctgagcacaatgcccttgtactcactagcaagtgatcataggtctgcatcctcctgcctgcctgaccctccaagctttcccacaaaggctatgctgccggaattccaaagaccaagagcatcagggttactagacaagattcgttggcatcctcataatgactctcaaaagatgccaacccacagacagtacctattgagtatagattgcaggacatactttccatcacttggtagatgaccctggtgaagctaaccattcctaatactcaagggttgcctcactgaatctataatcagataagtttaaggttaacaaataaactgtcactcacccacagggaacctgacaaaatgaagacaagggctggccctcactttaagtgggccattaaataaggagagatagctttagcacatcagagggcaatgaggttggtccctccaggtaaacaagaaagaaacaaaacaaaaagttttctatcacaagggacatttttgttatttttattctttttctataggttgctcattaaaagggaaaacataaggaacctggaatagaaaggatgtcaatgtattggcccagagtaaaagggtagcagggaagggaccaacagcagaatgacaagggccattaacaaatacagcagtatgattgattgattgattgattgattgactgactgactgactgactgactgattgattgattgattgattgatttttgagacagggtttctctgtgtagtcctggctgtcctgggactcgctctgtagaccaggctggcctcaaactcagagattcacctgcatctgcctcctgagtgcaaggattaaagttgcatacaccaccacctggcatttgggtttcttttgttatatatgaattcctggggctgccaggctgaccacagaggaatgaggaaggagaatgaagacatggtctgtcatgtcaccttgtccagagccaactcaggcatcaggctgggactaaggaggtgacacccaaggcatatcctccattggctgcacactagaccttgagagctgtgggcggcccgttggctaagcttgctgggactaagtcaaggtagacactattggcgggcccccaggagttagtggcaaagagcaagtgtcttccctaacagcatgcacatacacccacatgaactcctgaccttggctagtgtttcttcttttccctcgtgattctcctctggcagatgccctggagggaagacatagatgtgcaccccccatcactcagaggcctcctcacctggaatgctggattggagaacattatcctcggtgcgctcagcaatcactacatgtctctgctgcgacccatcataaataaagtaaaactcggcatcttcaggaagataaacatttttgccaaactttgcatagaccgtcctctgtccctgaaaaacgagtaagtctgggcatcagtacacttccttgttctggctctgagaaaccacaggggaagggcacaggcccacaacattgacacttgtcatatgcacttcatgtgagtgagctcaaatgtcacagagcctccgaccaacaatgaccttttcccaggaacaccttactgatgtgtctagtatgggagtaagagctggcctacactttctgaaagtcaaagaagatcaaggaataggaaggaatcattcttttaatttgctagatatgtgactgtgatttttttcagtaccttgaattcctactccccaaacatcactgtgcataataatgttatcccatatgtgaaataccactggcctactagaatcgcaatagttattcttagcttaggccttagcatgtgctagaccactgtacaatacattaaacataaatactcacagacatttttcatataaacaagagtttttactcacatgctgtaccaactgccttgaccccgtcttctctgagtgaccccatgtcctctgagtgatgtctaagccctttttatcatctgggttggcctcctcttttgtcttaagagtttctggctaatacaaagccttacaaagtgtcctggttcccagaagaagcattcctccaaaggaatgacaacagagttgtggtcttggtacaggaggccttgtcaggggctagctgacagtcaagcctgccaggtcatcccaggatcctgcaggcctcagaggattcaggatgctccctgcctggagtacacaaaggcagcctagagcaggtctccagggagagaggatgcattctgcccagcccaggggagtgacagggagatgaaagccaggagaatagatatctactctagagacttgcacagcttactcgatatggagaaggctctgggtgtctgtgtagctgcctaaccaaaataaacctgtttctcatcctgggaaagggagaagaagccaagaagagtcagaataaggctgctggacatgagtgtcagtcccacagtcccctacagcatgacactgcaggatgctaacagttaagttaaggaggagcaaaacaccagcccaaatggggctcctgcgcccagtgaccatatcattatttgatctaaaaaaatgtttttgaaataaaaaatgctgtcttttcatactcttgcaatctcactctcagaaaggcctctaaaattatgaattaaaagtgctttgggaaacacactggtgttcagttccaaattttcctgtctttgcatgtaagcgtgtgtgtgtgtatgtgtgtgtgtgtgtgtgtgtgtgtgtgtgtgtgtgtcacacaaaggaattgatagaaagtgatgtgccaaggaaaatctaccatacaatagcttcagaaagggaacaggaaggagagctgaaaagcaaaggacaaaaacaataacacacatttgacaggaccgaaagaggaaactcagacgactttccatttcctataaaatgaagaacagattgctttagtcgtgttcctggttgctaaagggctgcaaactctccatagatagaccctgcactggcctactagtggttttcttaaacacagaacagattgtataaatagatcaaagattttcacagatcacaaagatacctgcatcggctccaaacaatggtcagattagtccttcgtttggcaaggtcaacaaggactatcacttaggcaagagcttcactacaacctttccaggtccatccttccctgactgcatagtcttgatgcatagtgcttccctctcgagaccacaccacgcttcacgatggtaaagacagacaacaggatacctcggatacctcgagagaggtgacctagttgtctcagcaacaatgatgacactcagaataaaagagatctcccacttagtgatcacaaggatatcagaaataaatcaaggattctggctaggaaaagagatgatgcagaaagtcaacggaaggagctgaggagggagaggcaggcaggtgctagaggacagcagagaaaggaaatctgatggtaggagagtaaaaatagtggtggtcaggaaaaggaacaggaggctcaaacaaaagctgagctgagctgtgtaggagatccctgggcagtgactactgaaaagaaagggctgagcgtgtgaatacagataatcagctgcagggacagccctaggctgagactgagctctctctggcctcagaggccactgaaagtctgccactctcttatgaagccactcaattcccacatggtaaagacagactccgcttacaaaactgccacatacaaacctcactcatgcccccagttgaactcaagggcaggctttgcttttgacaactgaaaacaataacctgtccaaaaaaaaaaaaaaaagctggatcaacgccagaatcacaactgcagatgggtgtgttagcacctttcggtgaattcactgggccccacatataaaattcaaatacttcattagaaatatagttcattgaggggctagagagatggctgagctgttaagagcactggctgctctcccagatggccagggttcaattcccagcatccacatggcagctcacaactgtctgtaactccaattccagggaatcttacattgccacccagctatacatgcaggcaaaacaacaatacacagaaaaaataaaaataataaatcattaaaaagaatagttccttaaaacttctggaaacaatgagagacgtataaggcaagattatctccccaaattaatctacaaatttaacatattccactcaaaacccaaactgaatatgttcaaggaaaattgaacaaaattattcaagagtccatttgaaagactaaataagaataaagatttggacaggaaataatatttgagtggaggggagagggaaaagctcttattattgcaaagcaaaataaagaataaaaccaagatcttgtaaacagtgtgacagtggcaaagagacagaacccaaagtagagaccagagaccaacacgaggacacatggaaattacataagaaagatggtggtgtctcagataagtagggaagaaatggtttctgcttcttcaagggttcatgtaccaacctgcatgtcctaaggactttttccttagtctgtctctctagggtgactatattagcccaatttctgggatttctcatgctaatgttctcatccaccatgcaggacacatatgtatagctatactctgtcaatgagaatattatttgctaggcaatctttactttttagtttctaaactatctaacatgcttggacaataagcaaagtactttcaaatcagataatgagaacagaatggtgcatctgtttatggtggacttctgcaatttagggccatagaaagagtttatacgtggatttcaggtagtctcagtacatgtaaaagtcattaaaaagactgtttctgtgtatatggatccatttattgagagaagggttattatagccatcataatcatttcaaaggtccactgatttttcacaggcttatggtgttagcttttgtaagaacaagcaaaatgaaagctcaacacattttttatggctctttaatggtaattgtcaacttttataagatgatcaacatgttctgttattttccaaaacattcaaatattatacacagcctctgtgtgagagggctttagggacaagagcatgagaaaggttaatgtgaactgatacagtaatttaactatgaaagttaactaatatatgccataaaaaccattattctcttacatgatagtgtaagtgaactgccaaactttgatattttttatatttgaaatatctttattataacaattctgtacaaaaccttccctgtagagcaaaaatctttgacaagttttaaaacaacaaaaacccaggataactttgcctttttataggaaagttaaacacactgcaggaaccaatgagtcttgaggacctgagagttagacacacagcattgtgtatcttgatttctgccacacatccaagccaattcacttcctcacaattcatcacccacagtgtcttcaggtgattctaaagaaagtgatgagggcagaaagtatttcacatcaaatttctgtgtgtaactaaagaatctcattaaaacgctgggcactggggagacagcccgtgcacaataatgaggacctacattgaaaaaaaaaaaaaaaagcacaatggtaaacacttgtaatcccagtacttgtcaggtagacacagatggatccttgaagttcactgtccagccagtctagcctacttgacaagctccaagccagtgagagactccaccccaacatccaaacttaacagcatcctaagacaccatatgttgatatctggtctccatgcacacacacacactatagttagaaagtgtttccttattattttctcacattattctatgagaacccctatgaggtactactgtgacccttatttctaaaggagaacactgaaaagatcaggtctcgtggccaacttggagcttcctgtgccagcctcagcacccttttctctgtttcacatttctgcacatcagcaaatacccagctgcttggtaacttccctcaagttttccatttggtccccttgataaggggtgtccaatcttaaactcctaggtacagtcaactcaacatgtatttgagacacttaacacaaagctgctcttcctaaaacccataggtgggagtgccatcccttcatctccctgaagatatgtgtgacagggacatttacctatagataattctctctggtaagagactcttagaggacaacacaaggtacatatgatccaaactagttaagaaccactgaattaaagcctgtttaaaccaacttgttttttatagtgtaaaatatcagggttactctaacctaacacccaacaaaattaatgtcaacacaaattggttaaaatggaggagaaatatcagaatatcttttttttttaaggaaagcttatttccttataggtcaaaagactcacaaaacatctctttagcagttgcctttggggaaggaatggcttctacgtccagataagatgaaacaaacaacaaaattcaacatttatcaggtagagactagggagagagacaaattaaaaggtccttcttcttcaggacatcagagtaggatagaaactatgaagaccgcagtgacagatgtcatgagacagtagaacaagtttaaggggatgattgaagctcacactttactgaaattttaatgaaatttatttatcaacacaaacaataactgtaaattaaaggtgtatgttaatgttcaggaagtggtccattatccaaatttatgcattaaactcagaaattcaaaaagtataaacatacaaaccaaaaaggtcattgtgaccttcatacaggatggactgagttgccactctgggattgaaatgacctttgtttctctaacagcaaaatcgagtgaaaaataattcaaggctgagattccctacaagaacagagcagactctgcccttcacctctcccaggatccaacccaaggccgcatgaaagctagataaataaatgttctgctgagccacagcactagcctcacaagtaggctttttttttaaagtgttctcatagattaatttccaaattataacttacagattacatgatactgaatacaaatacctgacatgcttcccgcatggcagtgggaagcatgttgggtgggggggctgagacagtagaaattatcatttccatactagggaggctggggcaggaggattgcagtgttttgaggctagcctgtgctgcatagtgaatttgaggttagtctgggatacatagaaagatactatctcaaaaatcaaaacaaaaacaaacaaacaaacctgcattctcacaatattcagttggtctcaaaataatctgtcacaacaataaaatgctgtttaacaactgcacacagggtgggattttagttagtaactagttaccatgaatcagtcttgacagacatgaaatgccaatcctaccctgtccagaaatggagaaacctagtaattcctctaggaatgaaaatagacacacttaggccacagaatgcttcagtctaaaaacagacaaaactggctacatgtttagaggaaagtgacaaagatgccaaagagatgcaaaaggcatgttgtcacaggaagaacaattgaaggaactggagctgttttgtcacacaagagcagactcctgggtaaacagtcacactgcaaatatctgagggtctgccatgccaacgacaagggattagatgtgtgctgggggtccctggggagatcccagaacaatggagggaaggctagggacagagtccagctccctgagagcattgtgaggaccagagaagtacagagctgtcaggcttcaacataggggaatgaacactaccctgagacagggcacttttgtggctactgttgtatttctgttttgcttttctgtgtgctctacaagacaacagtgctaaaccatacccagccctgtgagcccagagcccacaccacctgctacagaattacagatgaattgcttcactgaataactgagtacatttcattcctatccattcctccctgtgctttgctcttgggcaaacacttaactcagttatgtttagtcctgtgtgattttcaaacaaaacaacagaaccccatagttctagtggaaggatattggaattcacaccattcaaatttcatttgggaaatgcatttcttcttctttttagaattaaatcttaaaagactgctatttgctttagtggattattaaccaattttaagaccccagagaggctccaaaccaccaggctcagttgagttgaaacaagtaatgaatttaaaattaaagaataaaatcgtaatagtagattctgttaaagtttatattttgaagttccctataatgctctggggaaaatatttctcctacaaaagtttccgtatcacttcttttgggttttttggcccctctattccctaacagaagacaacactctatcagtcaccagcaccaccaatggtctaagaaaatatttcccatacccattttataatttatgactcgaacagcttggtagttaccacaccataaaagactgtgaggtcccaccaacactttggaatcttgctgaactggcacagacagcaaccacatgtgcttgttatttaacatttgaggactgtgggtttatgtcaaaccaaatgctatctgatggtcagcgtagtttggctgacagctttaaacatgccaaacctaaaccaaaacacacaacacaaagagccttaagtctctgtaaattgatctgtcctgggcaaagaatagtgttataaccatcaaaagtctccctgcaggggcagaccaaggagaccctgtgctccacaggaaggccctcctaggaggtgtaagagcaaggaacagtgctttttgcccctctcttctgggcagcagctgagcacacgctgcaccacatatacacataccacagagcaggttatccctaagagcactgaagaccctgccaaggaacaccaagcacaagataaagaacctagtcatcctcagcaagagattccgaaattataaacaaagttcatttagatccaagtccttagtttataagtaaagatacagaagacccaaagagcccatgtcatggctctccattatgttgcttcaagctcccagaagagcgccaacctctgaccccccaaacgagcccccaccactgggaaggacttttattgaaaaagtcagaaataaaatcaataaccttctaccaagccccacttcataatggccctctcccctaaaatgtctcctgtcacctggactaaaagcaaggcagtactattctcctccatctcccccttccaagtcacagcttaagcaggtaaaatcctgaaccttcccctttcacagcatggaaaacaggaagcctaactgactgagctgggagaaacgtggaggcatctgggaagggcatcgagaggggcgtcagccccacccttcacacggtgcagggaagccagaagaactctgctggggcagatggaaagtaaaaataaacagcagcagacagataacaatgtcgaggggaggaagagctggaaaaggcagcccaaaggaatgggatcaaaatcgggagctggagaatgcatcgattcacggaaataaaggagagagcgcagtctgccagggacaacagcttggaaagcttaggaaggaacaaggaggtagaccagggagaaaatgggcctctgcttggaagccaacaaaccaggaactgagggtaaaagaggcgctttgcaatgttatcttttcctggtagtggcaagtaagagtacttttccaaagcccttcttcccaactaaccacacagcatcaagttgctaagtctgtctctcagtgaactagaccacaggtgggcggagtggtggcactcttggaaagaccggccccacccaaagagcttgtcttattctccatcccgttcaggcagagagttggctggcttggtcattaaaaagcagcttttgccagccctgtcttttcttgccccttgttaattcattctcttttgtgttctcacttttgcactcttgatctaccctcctcttctcctttctcccccgccctgctcaagtcaacggtttgggactctaaaccagaagaaaacagacctgctatagagatgccaaatctttgctcccccagaggtgtcatctgaccaaagtaaattagggtccacccttcctctatacttcagccagcacaaggtccagaagtgtgagagtagcaactatagccatagacgcagagagttaaaggagaagagcctgagagtgaagttaatcttgttaagaataatccttcctcagtgatgctgtgcaccctagagacaccacaggtaagtaattggctcaggattctcctggacagcagcactaaatgtcctcatttatccatttgtattcaagatacatacagagaatacactaggtgtttcggctaaaataaataacctgccctcatcaaactcttctagtgggagacacagacactaaataaataattctgcatctgataaggtcataagtgcagaggaaggtaatgctgggtaaggagaacaaagcgtcaagagcctctgatacaatgttactttaatagagacctaaataaagtaaggcacaaagctgtgtggacagggaagagcatatgaggcaaaggccctgtagtaacaagaactggagtgtgtaaaaagcagggaagaaacttgctaatacatcacaggggtggaggaggcaaggtcagagacaagcagaggccatccaagggacttggctagtgagcccaatctggagtagaaaagtaacgaaatacggtgttcaaaggatcattctggttgttttgttgacaataaaccataataggacatgtttaaatgtgaggaagccagtccatcaacccaggcaaggtctgagcggacatcctgacagagcagtgtctgtgtatcactgaagcattactgggattctgtcggccgagaagggctgatgcagttgtttttgagactacattggcatctagctctgcttctcccagatcacagcagctccagcaaccaccacagcagaaagcaacactttctagaagccaaacaggtaactgcagtgatctgatgctagggtgggcttagaacttggggccatttttgccattcttaaagggaaatgaatgagtagaccaacgagagagtaatccctctggtggcttttaccagcaattacttacagcatacaataattaaatggccatatgggtcaggtagcattttttaactaaacatggaagtcgctttgagcatcctctaactccagctgcaactattgggattaacaagattcagagttttctaatttcaactatgacaaaaaacaggcacattcaacctgagatggtttacagaccattccatggcaggtgcctactgaagacaacacctaaacattgtcagggtccctgccatacaggcattactatagacattgtttcaatatcaaatatggaaaacgtggaacctcaatgtgaaaacagtgtgttgataatttgaagttgcttaaggataaaaatcgccaccacaggagtcctcgatacctttaaaaactacatctgtatgcttcaaatatatggcattctggaaaagatagaactatggaaatggaggaggggagattagtggctcccagggtatagtgagcagagaaactgtgaataagcaggtcattgtattagttatcgtttgttggtatgccaaaatgcccaacaaaaaagaaaaaagaaaacttcagcaagaaagggtttatttgggcagcttctgagattagagtgcatcatggaaggaaaggcatggtagcagaagcttgaaacagacaggaagcagagagagaggtgcatgctggaactcaggcccctttctcctttgtattcagtccatgggatggcaccaccaacaagaaagaagggccttccctcttcagttaagcctcactgggaaatgcattccctggaacatgcagagaagtgtgtctgtcaagtgatttcaaatccagttaagccaacagtgaacatcagccatcactgtggtttgtagagcaatggtggagaggtgtcattgctctttagtttaagctcagaagatgcgcagcaccaagagagagccctaaagtgcctggtggacttcaggtgattgtctatgcagctcttcaagtgtaacacatgtgccaccctggtgaagtgtgttggtaatggggaaagccacatgtgtgaagggagagaacatatggaaatctcggtgccttctgctcagttttactgtaaatctaaaaatagtctttgaagtaattagaattaggccccagtgatcaagagccacattcagttgggtaagtcataggaagcgctcagagtcaggcatgaaagctgagatcagaatggcaaggtgtgtgtgggtttattcaggagggaaagtaataagaatggcatgaaagggaaggaaataaaaatggatagtgaagaaggaaaaccaattggaacatcaaaggcccaaacacaaaacaaaatggaaggagtaaggtactccttgaactcagtgacagtgagatcagcaagaaggtgacacagttgctctttatagagatcccagaaagctgttggtatcacaataacaccacatctaacagtcccacagaaattttgtttgaataactgctccaagtagtggtccaggtcccaggttcctgccatcttgcgactgtaagttcccaatttgccttatccatttcaaccagtctgaggaggaaaatcatagaaaaccgtagattttcaggtctgtgcatggtacccatctctagcaccaagatgtggctggaaggtattttataggcaagtgtccaggaaaaggaaggaatggtctgattatgggctccatgtctaccataagctctcattgaatgggtgaagcccacagaacatctaaggaagagaaggcatggcaatgggagctaatcacaccacaagccaaggtcaatcaaaagtgaagaatacactttaaaacaaaacacacacacacaagaaaaaaaaaaaaaacatgagaagagagaaaaaaaaacaaaaaactggagactcatgactcatattggaagttctggttaagtactattttcctgcccagaaagcttttcaaaagcacattcccctctcccccttccagaattctcactccaagtatatttaccccaaatacagcatcaaaggctgtactgccataagaatcccttaattcgggagagaagggaactgagagaagcaacctcatcaataaaaaaattgtttatatcataaaggaaagccaccattcctctggagaagagctatttctgtgaccaaagactaagttatggctgtctgcttgtattagctgtttctgtcattccacaactaaataccttgcagttccaaaggatacagttaatcgtggcagggaagctatgctagtaagaactgaaagtagctgctcacattgcatccacagtcaggaagcagagagcaatgaatgctccaacccatgggatggtgttgcaggataattgtacactgtgtaaagacgtgccattgtgattgtttaataagaagctgaatggccaatagctaggcaggaggaattaggtgggacttctaggcagagaaaggaactctagggatgaatctaggcatgaagatttcaatagcatgacatggtacaagtcagatgcacggtactgaagagaggtaaagagccacatgaaaaaatgtagattagtaggaatggattaatttaagttataagagctagttggaaacaagcctaagctaaggctaagctttcataataatgtctccatgtcattatttggggtctggtggtccaaacaaagtttgataagaaaacttgctacagacaggatgatgccacatatggggtgggtcttcccacctcaatcaacttagtgtggaaaatcctcacagacacacccagggattcattcccatagtggttataaatcctgaggcgctgaccatcaagattaaccatcactccaacctgtaccctttgaagtcacccaaagtccagcacaagtagagtaagttttttaaaggcctaaggctttataacttacctatcagaaagtaagacaaatctcattccatatgccccgtatttcttcaaaactgactatttaaatagcaacctgctgatcatacgatggcagtaaccttgagtttcttcttaaagtctcctattgagtatgagtgttctgaggctcccaactgtttccttaaatgtaaatgatctcaagatattacacaagacccctccttttgaaaacatccttccacaactaagcctacacacatctccaaaacatgctgcttggatctgaaagatctgcttgaagagggtcttccaccactgtgaaccctgaagtcctttccaaacagatggatacacactcacatttgcagaaccagttatacactccttccagactgcgaatcccaaccctctgcccacataaggaaggcacacataacttctttgagtcaatgtaaacacattcccaataattatagaaattaaagcattcctcttgaaacctaatatgctaaattttgttgaacacacagttgctaaaatggagtctccttgtcaggttttaaatgtttctggataagagatttgggtggttttgttttattaataccaaaagcagagaaagaggaaaaaaatcaaagcagattgtatggtcatcataaaatacacgagttcaggccgctgagatgtgtgttttcaatggtttgattaaagactcaaaacaaatgttagaaaaagaactgtaaaagatttaaacaagtgatgaatttaagaaatttcaagaatttttctttttaaatctaaactgttaaattctaaacaaatcaaatttagagtccgttgccctgtgtcaggcagctgttaccgagttggctgtattttgcatctgttatctatcagtggattcgctggattactctgcccttcatcttgcctcaaaggcagcttcagacaaacagtagctgtgcaatccagcaagcggggctgcaggcctctatctcctcacctcccttcctatctagccaacagtcaacctgccagtcattctcccaggcttctagatcatttcctaacaaggtgacaggcattttagttcaactagcactctgtgtaaagtagacacagacacgtctgcccgggacagaatagtatgtagcagaaatctgggtttgaggccagattgagactccactaaatttcactttaaaaccctacaaacagaggctgcaaagacggcccagttggttaagagcactcgttgctcttgcagagaacttaggttctattcccagcacccacacattggcacgcaaccatctataactccagttccagggaatctaactccttcttcttacctctgtgggcaccaggcatacatgtgagacacaagaatcaaatactcatatacactaaataaatacataaatatttttaacttacaaattaaaacctataaatagaaccataagccacaagcaataaactacaaataatatggatattagtgctttgtgtttgtccctgagccaaagcaaaatgatgtacaaccaaaccaagattaagttatgaattcattggatagcactgggcacctctgtcgggaacacacgccatcctcacagcacttcaccatatttcctattatccctacttttaaaagcaggaaagtgagactctatgtaaattaggtcacagctgggatttaaattcagacctgtctccactcactgcttactcctatttcaagattaaaactattgttagaatgtgtgtcaatagctcaaggatatttaagatcccccccaccaaaattttttttgaaaggccctgaaactctgttctctcaggctgacaaaaatagtctggataatttggggcaggggtgactacttactataatctggacttcttgtcagggaaaagaagtacttgcctctataacatcaagaaacagcagcctcaccctcagaacatggtcggcacttaaataagaaacttaacacatctcacgcactgaaataagaggtgacaacataatgaagaaaaggagtatcattttttagaaacaagaaacctctagatttctacagaatgggaatttctcaatcttcatttagcatttacttaaacgcaagggccagccagcacaggtgagcattgcagcctggcagcttcctgtggaggtaagacagacttccttcagtccaggggacatggtcttgaagacaaagtcagcactgtccacagatagcatcttcatgagcaggccagtgcagatcaccacttcctggctggccacagcccactaaacctgctctcagcttgaccccaccccgatcctctgaggcagatgtctgttataatctctgtttgacaaataaggaagcagaagtagacatcgctaagacaatttgtccaaggcactgcagcttgtcaggaggctgagccagggagtctctgcccaggtccttagagagactcagctatgcaaattagtgatctcacatactcttcaaatccctggaagtcaacagaggacttactctacacatagtgacagtcacaaggctcatcacagtctctaggatatctaacattacctgacttctgctcatctttattctccatatccttaactgtgtcatgagctaccaaaacaacaaaaaaacaaaaacaaaacaaaacacaaaacctctcgtatcaaaatgccagcaccacatgttccctccatcttggggacgagtttacatacctgtagccgactatcccacatcatcactgttcttttttgaacaccatggagatggcagaaagaatagccatggaaagtagcaggacagagacatgctcaagccagggttatctggctgtgccaccatcagatgaccttgccagggttccccagggggaaccttctcacttagtatgcccactgctatgctcagtaaggagtgctgttcagttctctgtggctgaaagcattccttagcatcctgcccattagcctctcatactggcttcactgtaaatgcaaagaggcctttattatattctattctgtattattcccaacaattcaaatatctttttaaatggtttattagcctcataaagtctaggctagtctcaaattcactgcacagttgaggctgccctgtacttctgatcctttggccgctcctcccaaatgctaggataataggactgtgtcacccacccggttttatggttttatgccatgttggaaatcaaacccaaaaccttgagaaggaaagcaagcactccaccaagctgcatccacagttccttaagttattgttaacaagtagttttgataatagacttaatctcagtactatcaacgggcagaaggattactgctaaggctatatagtgagactgtgtctcaaaaaagaaatgaaggagggagggaaggagggagggagagaaggatgaaggaggaggaagtaaaagagggaggaaattatctagttatctcctgacttgaaagaaaagttgaatttcaaattttcaaatccacaaagttgctctgaaatttgtctaggcactgcaaagaaaagccatcaattgagaggactgatttaatcaaccactagcctatttccttattatactgtgataaaacaaagagataattatcttaggaatgaaaaacctttcaagcaacaagtggggctctgtgctgtgctcagtgttgcccatggcctcagtgaaggcccagatgagcttatcaaatgtgccaatggcagaaacaagggtgggaggatcagttaaggaagtcagctgggtcaacactgagatgaacctcactatcagtgagagttctgtgctgggatcacgacacctcagtagcatgaaagaggccggaagtgtccagtgtccagctagacactgctacttcggaaaaggacctggagattctaatgcggggagccaaggctggctcaccaaacatgatgcagctgcccagattcagctatgtccctgcaagacagcctcagatcagggaaggtgacaatggcctttcctcctacattaagcagaatcactgcagcgttctgctctattagggacaccacatgctaacaattttcggggctcaattattaggacaatatgcatggtaacaaccctcaacccacactgtgaaggtggggtccctgctggcgtgagacacttgtgggaggatgtgaaagtgctttgcaagcttttgagggatgcttccaggacagagcagagttactacacaatgtcttgggggtcagaactggaaccaaatgagagaattgttgtggggtggttgaagcaattaaaattattagtatctgtttcagtttgctttctcttgctgtaacaaacaccatgaccaaaagcaacttggggaagaagggatttatgtgactttcacttccatgtcacaatccatcattgtcttggaggcaagccaggaacccaaatagaaaccacggagggatgctgcttatggtgttgctccctggatcccatttagctagttttcttatacagcccaggctcaccgacctacagatggtgctgccacagtgggatgggccttcctcatcagtcttcaatcaggacatggccacaggccaatctgattgaggcaattcttcaatggaagttcccctttcccaggtggctccagggtgtgtcatgctgacaacaaaaactaaaatactaacaattaaaaattgttttgtaataactacaactggccaatcatggactgttcctccaccattagccacacttaaggagagtaaccagcatcttttctgttatcagagagtgttcctatacacaacagtccatgatgaagacaatgctgtcctatgctaaacaagaacacccttctgttcttgctgatatttggggactcctgaaagatcccagaaaaagtgatcacaacagatcttttcacagctccccctaattctaaccagggatacaaatcacccatatagatcactactctattttttttctttatttttgtctccaaaaagagattttcctatctctatagatctggctttggggggggagcattgtttgaacagtctaatacagtttctccttcctagctataccaatccacgtggttactcttctgttcttgtatcaaacaccaagaccaaaaacaacttatagaagaaagaattttatagtaagaaaccgaaaccgaaaacgcagtccccctactcactctgaccacgccctcacaagccctcaggtactcttgtagccagcccctaagaaggcgtggctacagcttcccctacagaatttattttggcttatggttccagagagataagagtccatcatggtgagaaaccatggcaccatcctggtgaggaaccatggaaccatcatggtagggaaccatggcagtgaacagcaggggtagaggcaggagcaggaaactgaaagcacaaagcttcaaatgtcccagtgatgtacatcctgcaacaaggctgcacaacctaagcctcccagcagtaaccagctcaaaaacaagattcaaatgtccaagactatgggagagatttctcattcaaactaccactacccaaacagcctctgtaataattttgcaaggaaactatattaaatggagaattttaaacaatgagcatagactactcttccagaggacccagggttcaattcccagcacccacatggaaccatccattccacagttctaagggatctgacactctcttctggcctctgcaggtaccaggcacacatataacacacagtcagacatgtagacaaaacacccatacataaaaaacaattttaaaaattaaaaaaataatgaaacccacatcaaactctaataaactgggttgttgttttgttagattttcaaaacagttatttttgttgtttatattttagaacttagaaaccatgaatctcccaaatctctacaggccaaatgtccttcaggacacttagacccattaggagactctccgcatactttcactttgaatgcaagcagtgactccttgtacaagagctctgctttcattttcagacccagatgctctccatgcagagagaacaaggcagggacttaatgtgtttagattaaatcacccaaaactgagggcaaacaacagtgggctacaggcatccaggacagctttaaaaggctggtgacattacttggtgtttttgtttttggggtcttttttctagtttacttaaaaagtaccaaaactacagcttcaataacacacgtctttctctcatttctttagaaactggaaaaactactgaaatacagttgtcttaagacacacttagcatagaattcttgctggccctattcctagcaacctccactgagcttggtaaactgatcacacactgtgctgctacacatccacaccaaactaatctgccagtgagtgagcagatcagtttccattaacccctctcattcccaagtgagctggacggcatgttccagagtctctttaaatgctttcccaacagaagactgaaaaccagggactagagagatggctcaactgtgaagagcgctggctgctcttccagaggttcagttctcagcacccacatagtggtttgcatctgtaatgcagttctagcggatctgacaccctcttctggtctctgcagagacaccaagtacacacatgatatacagtcagacatgtaggcagactaccaatacacataaaataattaaatgattttaaaattaaaaaaaacatcaagttctaattaactccattgttaagtttttagatttaaaaaaaaaaatgtgtatgtgggcaggtggaagggcttgtgcatgtaactgcaggttcccatggaggccagaaaaggacatcaaattccctgaagcagcatcatgggtgattgtgagcctccctgaccccctgaccctaacatgctgagatctgaattctgtcattgcttggttttaggtaatgtgtccatagggaagatagcaaactagtatctatataagttgaaaactacataaatctatatgaaaagttggctaatcatacctggtggagaggaaattcagagtctagaacatccaaagaacttcaagttttccctagaggaaacacatcacaccacacacacacacacacacacacacacacacacacacaaacacacacacacactttttgcatgagtctggtctttacaaacacactcggtcctgatgggaggaaaagcacacattgggaggggctttatttgtaatgctttcttgtgtgctatttgtcttgaagttaagaactggaagaagaaagagttcccaagcatccagaacagcagcagagtctgtgttctctcagatccttgctctgctcttccttgcctcgccaaatcttttcaggcattctttacagaatcataaaaacatacctcatgtgcaaccactttaaaccaggcatgtgaacaaacacacttcacacccaagaacatctagttttccagatagctacaaactgtctatttcaatagaaaccacccctgaattagcaatgcaggagattatttataacaatctctaaccttaatttcattaaaaaaacaatggattctcttatacagatataggacaatgtttatattcaccatataaagaactgttaagagctattgtgtttatacaaggaggaaaaaataatgcccagtggattaacattctattattacccatgggctcacaactgaagcatatttctcacaagacaatgggacatattaaccctaactggccctaaagatcttcacagaacagagtgttgttctgtgaagagctaccaccaaggaacactaatctctgtacagaaacatctcatccttgtgacctggccttatgagtttcctatcattaagtttaagtgtagatattatgaagacattgaaaattattatatctaatgacatagaacaacacttgcatggtgaaaaacataacaaaaaataggtaagtagcaagtattttgttatagtaggatgtaatgaaatgaaaataaaaaatacacatgattggtttcttaaagcagtggttctcaacctatggctcacaactcctttgggggttgaatgactttttcacaggggtcacctaagactataggaaaacacagatattttttacattacaagtcataaaagtagcaaaattacagttatgaagtacaaatgaaaataattttatggttgtgggcgatcacaacatgaggagttgtattaaagggccacagcattaggaaggttgagaaccactgcaggtttcttggtaattttctgtgtttttctagttttctagactgtccatgcatcacatttataattagaaactaaagctacaaaaatctaaaagagacctacagttgtcctttttaaatttggttttattttgtgtgtgagtgcttggcctgcttgtatgtatgtgcatcacttgcacacctgctggataaggaggccagaagagggtgtctgatctcctggaactggagttatggatggttttgagtcaccaagtgagatcgaatctgagttccttgcaagagtggcaaatattcttaactactaaaccatctctgtagcccctaacagttgactttcagtaactatgaacttgtcttacaatccagcacaccacacctacaggcatttctttaggtatagagcatggtgtgatcttagattagcacacaacctgtgagtgatcacagcagctctcaccatgaccaccagtgatcacagcagctctcaccatgatcaccagtgatcacagcagctctcaccatgaccatcagcaaacgcaaaaatcccttgcagtctccagtgagtaacagacactctgcccagtgtcatgctacccagaatccacaggggcagagaactaaaatgtacaacaacctcatgattctccaacacactgcactgttaaaatgaaattttaatgaccatataacatgattctgctgatatgacatctgagaagattacagattaccagttatgggggcagggcttgagagggagtggccctgactcttgaagatgatgtatatagtctacatctgatggtagtgttgatcatgggacagtaagcatttgtcaaataacaaaactatatactaaaggagtaaattgtgttatattaagttgcacactgataaatatgccttttacaaacaatcaccctttagaaataaaggtatatacccattcagattataccaaggtctatgaaatgcttttccaaaatttccctatggaaaagatctgtgggtcattttttaaaggttatatgaattttacatagtaggcacaggattgtgaaggaatgggacacagatatgaggagtttttgtttgtttcttgtttttgtctttcaagacggggtttctctgtgtaacagtcctagctgttctggaactcactctgtagaccaggctggcctcaaactcacagagatccacctgcctctgcatcccaagtgctggaattaaaggtgtgtgctggcctgatatgaggtttttaaatataggtgtgtacattacacaaaacttggtatcaaacctcggtagaccaccggttgccaggaggggatcttacaggactagagaggaggttcggaagatgaggaccactgactgaaaatgttgactgtcagcccccaagtagaagctccagggtccccacaggagccatgactctggccatcctagcattgccaatttcctctgcctctaccaaagcatttctgtatcaagtcatgcacgactgagtggtcaccaggctgctttggtccatctcattccagacttaagctgctctctatgcctttatggtattataaaagtgtgtctgccagatgatggagatgtaaacagcttctcctcccaatcagtgattttcaccatcctagtgctgcaaccgtttatacagttccccatgttgtggtgacccctaaccataaggctattttcattgctacttcataactgtaattttgctactgttgtgaatcacaatgtaaatatctgtgttttctgatggtcttagttgacccctgtgaaagggtcatttgaccccccaaaggggttgtgatccacagattgagaactactgtcctaaatgaatttgggagcaaggagccttttctggacccaaacgggggacatggttctttcagtttcttttttttcatttcaaagttcatttaaaaaggccacaatttaatccttgtcagaattataaagtcataatgagaacacaaatatgaaaagtagtttgtatagagcaagaaagtgtttttctaaagaaacattctttctaccaatggaaagtttgagacatgttttctatggagagcattcgagagcagcccagacaagtgcaggtataattactgagcagcaaatgaacaatgaacaaccttctgtctgtgcacaccttaaaagaattgtccagcatctggatcagcatctggatctacagatatcataaaacagaagaaaggctgcccagaaaaccaatactcttgaaagagaacaagactgccaattaagatattaaattatttttaaggctttaatcagactatttacacttcagctgggcatagtgtcacacacccatagtctcagtattggaaggtagaagcaggtagaacagagctgaaaggagttgaaggctagccttggctaagcacaaagttcaaggctagatggtgctattttacaccctgcctcaaacaccaaagtcaaaccaaagaaaacaataaataaacaaacaaacaagtaaatggagaagggactgaggaacaaatggagggagggaggaaggaggaacggagggagggagggagggagagagagagggagggagggggaggaacggagggagggagggaggcccatgtttaaaagtggggaataggtgtcctactctaatttacttattaaaccatgttacctgagcctgggggaggggtagctccattggtacagtgcttgttgagaaagcttgttcaggacctgagttcagatactcagacccatataaaatcctgggtgtcatggtgtctgtaatcccagaactagggaggtggagatgggcagatctgtggggcttgctagccagccagcctgctgaaccggtggtctctgggttcagggagagactttgtctcagaaaataaggtggatcctggatgatgaagacacctatcatcaacttctagcctccatgtggatgcctgtgcactcacacaaagtaaaaaataaagtttaaacaaaaacaaccagatcaccaaggaatggctactctaaaagttagccttatttactaatatttatgaataagatatatcctggcccccacacatgtgcacatattgtatatcttcatttctcatgaaatttaaataacgatctatcaaaaactggacatctgtctccttgcttctcaacagggttttctaaatgtcaaactagtaagtttacagcaataaccaaatgcccaacaataaataggagtaaggcaatttacagcagttattttcatgttctacctcaaagcaaagatggtcaccctaaaagatagtgtgtgtgtgtgtgtgtgtgtgtgtgtgtgtgtgtgtgtgaagaaagagatgtgttaaggtggagactcatttgaactacaaaccaaaagcaccggggcacttccttctatgctattcacaccatcctttattttgtcctatactccccaagttatcacttaagcaactgttgactttacacaagccattcatactttctgtgtaccttaaagttgttcaagaccagaggcagccactgagcaaactggaagccagcctgggctatatgacacatgccatttataatatatctctgagccttaacgaggaaaaaatcacacatcctgagtaagtcaagaattagataaacggtttatatacaaacagccaacaagatatcagggtgcagtgcagaaattcaagaacactctttagctcttttcctctttcctttccttctagagagtttttgttatgtagttgcgatgaatcatttctgcaatctcctaaaagaagagttcagctagagacaagctttgatgtccctgaggccatatggacagttatgcacatgacctactaatgaataacttgtcaattagtagtgaacagcaacaaaagacattatctgacgggctcccagatacaattatgtgatatcatgctgtatgctttggcttgcagagaattttccaagttaagacagttccagctccaggttcatgacaggaaccacagctaagcctctgtataccaaggcatctctggcagaaagagactggtgagaacacaattcataaacagttcccaagcaaaggacacaagtttgtaatgaaatcaatctcttcttttgtttgtttgtttttatatatttgaattacaaacaagactgaattacatgatgatcccagttcccttctccctcccttcctcctctcctacccccccactcaaatcctacctgtcatatgtcctttcttctattctacacctgactcaaaatttctgcttcctcatgacctctgcatccttccttttcttccctttgaaaccaatctttaagtgaagtgattctaaactaaaactaaaagtaagatgatgtcaagtagtgctatgaaacgctaccttctggtttgacatggctacagcactcacaaactcccaacgggctagggtcatatatacaatgtcaatccagcaaaaactccagacacagggggaggaggtgcccttcaggccccatctcttaattcagagctattggtaattgacaggtactgggggagaaataatcatgtttgtttgtttgtttgatgtgtggccactggtagatttcccaagttcccaaggataatcccacactcatatacacatagggagaaataattggatttagtagttatcaaaaatccatcaccagaaaacaagaacaaaggacattaagtcaggagaaggccatgttgcaggaaattcagggagccttggagaggagacactggaggaggatatgtttatgtatatggaatacacatatatgtttatgtatatgacatacatgtatagaattctcaagaataaacaaaattaatattttttaactagcctgcccaacaagccaaactcaagctcatcttaaacaaaggcctcacggtgttcaatgtagaagcagttctggaaagaaatgagttctaaagtcacaggccagtagaacaaatccaggttctgtggagtccaggtctgcccccagccccttgcacattcaatgggatctgtagagtgcatcttcttgagtagccagggtttctccagcccacaggagatccaatatataagcagtggctcagaaaaacaatagaagtgacatggccaacatgtgtccacagaggcctggcatgaacatgcagttcccatggacaccagagcagggaaaccatagaaggcagccctgaggcttgacggatccctcaagtccaacaggaaaaaatgaaggtaaaagttaagattcagcaaccgcctgatctccagattcccagaatgcactagagtgggaattatgggcatgaaacttctcatttcagtttacaaaggaatgacaaatggaacaaagctgagcctctcccagtatgaagaaatcttcgaataggcccagtgcagatgaaggtgctgctctgacagaaattgttctggttcccccaaaggctcttcagagcctacagcgccactaaaatggcaacacacaggcgccactggcactgtgatggctatgcattccatgttgttgtttgttgacatcaactttgagacatacttacacacaagtgtttgccttttgtgagaagcagtcagtgagtgggaagaagtctaaacaatggatatctgactctggggtcctggtccaagtgccataagccctctttgtttatttctccaagtctcaaagggagccattcccttccagttccatccatgtcctcagtctctgtcaggtgagacgctcaaaccccagtttcacttcctcacttccacatccctgtctaacgcaccccatccttgcaaaattatctccaaaatctcatgacactcttataaaagggcatctgtgttgagataatcattttgtacactgtgtaaagctatgtctctgtccttcctcacctgcctaaagcaccttctgataggcttaataaagagctgaatggccaatagctaggtaggacttccatgtagagataggaactatgggaagaatctggtgtggatgatttcacctgtaagacatgaggaaatcagatgtatagtacttaggagtggtaaagagccatgtgacagaatgtagattaatataaatgggttaatttaagttttaagagctagttgggaacaagcctaagctttcataaataataaaaagtctccatgtcattatttgagagctggtggtccaaagaaagtccaactacacatctgtgagggttattttttttaagtcttcatacctctgatttcttagggccactgccatattccaagtcattacatctagattaacctttatgtatttttaaaacacattttcattctaaccatttttctgtgagacaactgataggctaaagacagaactgataatgggaactgtaccgcccactgttgagcctgtgtctttccccagtacacagtattctgtggctttactatttaataagtctttgttatgcatttagaatttagaaatataatccccagataaatgagagtagatatgtcccaagtcccagtggtccttttctgggtccaagcagccaacatggtcaggttgttcagagcagcagagagcaatccaggagtgagacagatttggatgctataatatggggaagctgttctggaaccattccaggaggtggcagagcatattacacacatggaggcagaatagcctggggaggagagcagacagctttccccaaccagccacagaaaaagcccaccagaaaaaaagaccagcagtgcatcaacaaatagcgggtcccactaaatgagcaggtggccctgaggactgcaggggttatagggatgaccaccagaccacagatgacaggaagaactgcaggggttacagggatgaccaccagaccacacatgagaggaaggcatgatagcacttgtgcagggtttcagaaaaatgtccccaggaactgagaagtataagcaaagtcagctcagacagcaaccatactctgacatggctgaaagaaagtgaattttacaacccaactagagcaaggatggaggaactcattggggggtaacatgaaaccagagattcccaaccctatacctgccttccccatacatgcagacactgtcctggaaaggagcccaggaggaaggcaaatataggagaggctaagtgttttattaactgaatgaatatacaaaacctgaaggaactgtttctacccctgtatcagaccaccaatatcagaatggactccttttgttatcatcagctacccaatgctcacagcaatcaggagcctcaaatcttgcttagaaaaaaaaaaatgaagaaattacatggcttcttgctcgaaagaaacattaggagatctataatcccactaattagtaaacagaagacaagttccatttccataaagactattttcagtgttgttattatttccatgactgatggcaacagcccttcaccacttctcattgtcaacaagaataagctcacataccagactcttaaaggcttacaactcaaatcgtggcttctcttccccacttcgtgtccaggaaacgctgaactctcttctctctgtatttctcccatctatatggcagtcaataaaatggtaaggagtaatgggcagtcaacaaaaatggaacacaacaggttctcccatgtcattagagtacacaatgctgggctatggcatcattctagtatttcccaaatattatgttgatgtgctctaatgagattagtcagaatgaactacaaggaagagtaaggagagcaaccacaacatcaagaggggaaaaataagagagtataacaaaccaagcaatataaaccattcaggaggtggaaagggaaaaagaaggacaaagtggcttcaggcaagacttacacaatgacagcaaagcaaacacacacaacaatttttgtcaatgcagcagaagccccacagtgacaagttgactatcactaggagctgtaattatggagttatacagtctacagagctaattgccaaatctgagcactcaccaaggtggaggatttttcaaaatctacctatcctcctctgtttcaattctttaagctcaccgactactcaagtaaggaatgtgttctttgttaagtgtgcaaataggtcatgcagcaacagcaatatccttcttccttgtttttctttttccagtgttgggcataaaaccaggggtactatgcacactaagcaagcacagagtcaccaagttatgtccccagccctgtattatcttcacagtgagaaacaaatggaaatgatgaacacaggaagaatagaggcctttagtcacaaaattcacagcctaaacatgaacctcctaagactcacaactcacaaaatttctacttagtatttagcttaactaagcacttctaagccaaaatcaataaactgaagcaaatatgtccccaagtactccttcaaaggaccttaatctctgagcaccagtatgtgtatagacaacctagaaaaacatacactaaaaagtctgaagaatgtcactaagagctgtggcatctgggttggccccataagagagacgtggtgtttccataacaaagcaaacagcaacaaacacaagctgttctgctggccacatgaggatctcgctggggccacagtgctgcccagaaaacacagcttgagcaggactctactgcttggagtaggagacctggttacagcagcaatgggccttctctgcatctagatatgcttaaggcaaaatgacaaacgtaatcaaagccccaccaaaacagctgtgcagtatgtgtaaaatcctacacacaagactaatagtggaaaggggactcggactcaaattcaggctcctgcattggcaaaatggtcaggtctccacatgttccagctcaaaatctatagattcaataaaccagggttgaaaaatactcagcaagaaactgggttgcaacaaacatggatagactttcttcttgtggttattccttaaaaaaatatagtaactatttatgtagcatgcatattgtattaggtattacaagtagatgatataaagcatatggtgggtggtgggtgtgtggtgcatccttacattccatcagggaagcagaaggcacgcaggattgtaagttccagaccagcttcacttacaaagtgagtccaggccagtttaggctacaaagcaagactttgtctccaaatacagagggttagaggtatagctcatggtactgtgcttgcctagcatgcacaaaaccatggactcatgatctaacatgacaacatacacacaatgattatgaaaactatgcagataccacacattgttgtgtaatatgactgaaacattcacagatttggtatctgagaggttgctagaccaatcttgggctaatgaggaagaaccttgtcaattcttacacaaagtaagaattctcagataatacattattactttaggaatgaaatgaattattaggattaatttaggaaataaaggtatttggtgggtggtagcttatcaattaaagagggaaaaacatcactccctaaggagtttttaatttctgtggtagtctgcatgtgaatgaccccatggactcatatttttgactacttggtgcccatttaatggaactttttgagaaggattaagagatgtggccttgttggaggaggtgtgtcactgggggtgggctttgtggtttcaaaggacattttttgagttggttctctctgcctcttacctgcagatcaagatgtatgctctcggatgctcatgccaccatcaccttttcccagccaactgtggactccacccctctgaaactgtaagcccaattaaaggctttctcttataaattgtctccttggtcatgcatcacagcaatacaaaagtaattaagacaatgtcttaagggcacatggatcaaattcaggttactcctcattctgaaagaacatacagtttaaaggagacacaattctcctccttaaaatgaagctgaaaatgtcccgtattataggggagcctactattcttcaggaagggacatcactcaagtgcatggtaaagaactctgattggttcatcacctctcagtcacaggacaagtaaatttctttgtaatgccagcataaactttgtgagattcaacatactctaaaaaactgtctttgaaaatgcaaagccacactacagggctaattgttaaaggctccacgaatggcctggtatccaaagaacagcttactgtgaccactgcacttgggatctgctatccgacacacaacagtgttagaatgtgccctgatccttagtcaaaatccacctttacaataagggatagtttctgaccatcattgatagtagtaaaataacaataataagagaaagctgactgtgttgcaggcctttgccttgggagtctttgttttgtttctttttgtctgaaaggcatccaaactgccttcctatttgaggcactcacccattgtgtgagtcctggtggcaggagagaccctacctcacaatggacatttccttccctggtccctggaagtcatgtaacccaggctcagctcctatccccttccaggcacacaaagaggcagagtccttagagactagtcacagagcttcaggaagccacaatgggagggagtcagtaaagcgccccagtccctgtgccagctctggagccacacttaccctggctgctgcagactctcctatgttcctaaggcagggccttgtatcactcctgcctttgttctcagcctgggcttccagccctcttctgtctgtattatgttctgcctaacgctgcctaactcagacttctattgcttgcagtaaaggatgtgacttcccccaggggagtagtgatttccatctgagccataaagagttaataaaccactgggagcagccacttggtacacaggacaataatgaagtcctcagtaaaggccacatagtctgagaaattctactttctcaacactagcttgtttagaaagaaaaatattcaggtcaaatatttattctatgaaattaatctctaatgatggaaatcgaaactaatgtttactttgggggagtagaaggaatgggagggactgtaaaagagcctgaggatgctggaggagttctgaattttcatcagggcagtagtggaatggacatgcacatttgtaaaaaacactatgtgcagatgtatgcatatggctacatataatttacctaaatgaacacacagacacatggagtcataaacagaaacacataaagaaacaggcccagctgatgatgtccacatgatgtcatggatgatcaggcccttagcaatctttatttatgcacatagtctcctttgaccttggaccttcccaggcattctaatctgatgatagacaagtccacagtggacacatttcaatgctcagcaccctttaaatgtaaggattcaggcattatgctggcctgccccgtcacctggcagaacgcacacaagcagtaccctggtcatcccatggttgtgtagtctgcacacaggtgcaaaggaaacctttaaaagaaagacaccccccccccggccacttatgctctctcttttctgctgttttcccggggcagacaggacttttcctgtctccctcttctcctgtcctctgtctctgtgtgtctgtgtctctctacctcttttctctttccttcatccccccttccctttctaataaaacttctcactaagctctgtctgcttggcatctttgtcccctgcctcggtcaccctcacctgccatggaatctaccaaggttcctcgagagctttatcataacactttggacttgggcatatgatcagttttggtgtcaccgccttttttcacacctccaactttggatcaaacttggtggccccaacatagataagtgatatctgccatctccatggcaccattgaccaatgtttcaaatgcaaactgatttctctgcccttcaaatccttttctacacaaatggccttgaccatctccctaactgatccccaaaataattaaactatgagcccattgctgacacaagcacttgatgtggccagctactaaccactgtcctctttatccacaggaggaaactaagatacttagaagccaaacagcttaacccttgaagacagcttgacctgaagctccccagtcaaccctcctatttacagctaaaatccaagaccagtacatcctctcctcttccttcattctccttgacagtgaagcaatgaactaatgatttctgtttaaagatatccattaacttttttattgcccccttccttccttccttgtattccaataaaacatggctcatgacaaataagcaaggaaagctgcttccatctagaaggtctatattaatccagattccctccttccagacaatagaaaatatttaactcacgatgaaaatttcatggtgactttatacgcaatacatacttagaatgaccaatcctggctgacccccagaatgacactctccattcttcacacttctaagtggtaagcttcacaaacacctcatgaccacatctcaagtagctctactagaaatttctacttgtccagaccccaaccaacaatctggagtgatgctggtaaccctgtttcctctgcttgtgttcagtgtctaccactctctgtacctgcagagtgcacactttaaaactcccaaaagacaaagttaacttgtgtcagtaagaacattgtgtccactgggatctaacactttgttctggatcctcagaaggcagaaaaaaatgagaggaaagaagggaggttggaagtgagagagggaaggagggatataaggaaacgaaggataattgaaaatgctgacataaaaacaagccagagaacgcagctgtcacagaagaatggctggctatgtctctgtggctagaactgacctgtttgtttgcttgggcaatgagtctggcctctaacaaaaccttggtaggaaggttgttttttttcacaattagaatgatagcaatattatcaaatgttttcatatacaaacactctacacagtaatattatttgattcccttagtgttattacatttcctccatttgcaaatgagttaaaagggtatataattatatgtggggatactattacaaatggttaataaagaaatccctctttaaccaatgttcattgcatttatatttacataattgtttccaactgatcaatacacaaagtaatgatctccaagctcaatacaaagttacagtgctatacaactcactgattgccttctgcctcctcttgacagtgaggcaaagaaagtcagcccatgagctgggttatcagcctggaatgcgagtggtggaagcatgcctctaccctaggagctagatgaggcctcttctgtgtacaaagcatgctaagaactcgaggggaaagttcactgagtttgtcttcaacaacttctcactggtcaacaaggcagagctctatgcaagctggggcaagtttgcaggaaacttcagaccctgccctttgcagaagtcaggcaagcattagcaggaccttccatagtcctagtattataggtaccaagccactcaaggagaagaaaaaatccaaaaaatctatgccaagaggcaaagaaaggtgaatagcaataaagatatctacacttgtacctcagtatgagaaaaaaaaagtgacttgtgtccaacagtactattcatcattctctcccctcacatcccacaagccactgtgctcccaggttcttagagagaatccattttttaaaataaaaacagaaccagggtcaaggcaagtaaggttggttgttatgttgtgcacgtaaagacatgttaggcaaacaggctgagtacacagcacagcagtcttaagtgacctcagggtatattattaactctgactgtgaaatccagcaaaagtcccagtctctttgaatgtaggtaacatttttataataatacattgcaacagaagttcaacagaggaaaaatgatcctctcaacagaaggtgatggaacaatggatcacatatattcaaaagacggtttgtacatacctcatgttaaacaaaatttaactccatggcatcatggatttcaatgtgcatacaagactggagggctttgttttgtttttgtttttttttttagaagaaaacaaggagaaaatctgcaggagtccatgtttggcaaaaagtatttagatatagcaccaaagacaggacctataaaaggaaaatttagggccagcaactcagccagtaatggtgcctgttgctaagcctggcggcacaagttcaaaccctgtacccaagaggtgaaggagaaaactgaatcctgagagctgtactctgacctccacactcacattgtagcaactgtaacagttacagacacacaaaatacttgtaatttaaaaataaactcagaaaactagagtcactttaaaaaaaaactgaagaaccatggtgaatgttttgaaaataataagtcacaggtcaagaaaaaaatacttgtaaatcataaacctgaaaagaaacttgtatccaaaatatgtaaagacttttgcaaatcccgtgaaaacaagcaagccactgtaaaatgggggaaagggaaacacatctccacagacatctaatcaaaaaaagcacaggtggcagggatgcccatggcagtgcttgctaccactgataagagaagcacatttgggccacaggaagctgcagccccaactgtcaggatgccaatacagagacccctcaagcaggggttgagccaggcctcaagtcacaaagaaaagaaatcacataataaaatacctgggctttcaacagaggaatatttaaactgtggtatacatataagggttacatatatacaattagaaacaagattgctttacatgtcaatcccagttccctctccctcccctcctcccctactacccctccccaactaaaaccctacctatcacatatcctttctgctccccagggagggtgaggtcttccatagggggtcttcagagtctgtcatatcttttgggatagagcctaggtccacccccgtgtgtcttggctcagggagtatccctctatgtggaatgggctcccaaagtccacacctatgctagggataatctacaagaggtcctggagatttctgaggtctcttcactgaaacccacattcctggggtctcgatcctggataccatgttggtatcccagctatcagtctggggaccaagagctcctcgtggttcaggtcagctgtttctgtgggtttcaccagcctagtctggacccctttgctcatcactcgtccttctctgcgactggattccagttcagttcagtgattagttgtgggtgtctgcttctacttccaccagctgctggatgaaggctataagatggcatataagtcagtgcagaattctaccagaaattcaaggaacagctaataccaactctcctcaaagtattccacacaatagaagcagaagagtcattgccaaactctttttatgaggcttcaataaccttgatacccaagccacacaaagacacaactaagaaagagaactacagaccatatccctcatgaacattgatgcaaaaatactcaataaaatactggcaaatcgaatccaagaacacatcagagaaatcatccaccatgatcaagtaggctttatccagggatgcagggatggttcaacatatgaaaatccatcaatgtaatccacaatataaacagactgagggaaaaaaaccacatgatcatctcactagatgccgaaaaagcctttgacaaaatccaacaccccttcatgataaaggtcttggagagatcagggataacaggaacatacctcaacataatagaagcaaaatacagcaagccgacagccaacatcaaattaaatggagagaaactcaatgcaattcctctaaaatcagggacaagacaaggccgtacactctctctatatctctccaatattgtccttgaagttctagctagagcaataagacaacaaaaggagatgaagggaatacaaatcggaaaggaagaagtcaaactttcactatttgcagatgatatgatagtctacatgagtgacccacaagaagtgttactcttaagtgacataaaccaacagcgctctctctctcctctctctctctctctctctctctctctctctctcgtgtgtgtgtgtgtgtgtgtgtgtgtgtgtgtgtgtcttgtgggcgcgtgcacgtgaatgggcacacgcacactaacctcaaatacattttgacaagtgtaagaagccatactcataaaggctacatattatatgacttggcacataatacagtctttaaaaatgaagactatggaaagaaaaacaggcagtggtggcacatgccttcaatcccagcacttggaagacaggggcaagtgaatctctaagttcaaggacagcctggtctacagagtgagttcctggaaagccaagggctacacaaagaaaccctgtcttgaaaaccaaaaataaagaaaataatgaaaaaagaagaaaaaagaaaaacagaatagcacttcttgggcattggagacaggaaaagggtttgactgcaatagactagtacaagaaaaccagagagcagatggaatcacttggtgcgaggctgtttttgccaaatcctacagaactctagaatacagaaagcttattttagtgtatataattaaaatgaaaccatccaggactgtgggagaacccagggtttaacacagacagtagcactgaagccaactgtatttcaaatgtatgtcatgagcacttggaaagaagtgtagaagaagggagctgacctcagccactgtgttctgactgaaaagcagagaagtgctgggtgtgcattgtgatctaatagtaaagtctacattcccacgggggtccaggtcagcaatactataaactacttaacaagcaaagtgctgggaaaaaatgatcaaatgcactgtagataatgacagcccagagtttcactgtcagagaaaatattttaaagaataaataccagaagggactctgcaggactggagttaggaaaacattcctaccaatggctaaacgatgtatcaccaactgctatttcccagagatataccgattgtttttgtttccagaaagaggaaggaaaaaaaacctctttgtttttgtttatttcattattcaattgacgtggtatatgattggggcggggttagggaaagttattctccaaagaaaataaaacatgctttatgtcaaaaccaactttatatggccagacatagagttaatatatacctgaagtcccagccacttgtgccattgaggcaggaggctggcttgaactgtcaggggtctagcataaactgcccaagacagcaaaaccccatctcaaaaatcaaaaacaaaatctatcatttttcaaataaaaaaattataaaatccatgagccagcctcaccattctagtcaggggtggctaaactgaggtgaacatatgagtctgctgagcaaacatgacaaagtttatatatgctatgggaattccccgatttctgctcagagtcagttctaagggcacctgatagaactccacaggcagcccaaggtccagcctccttctattccacgctacgaatgccacttcctggaaagaggcagaccgaatatcctcaccaaaatctcaagtggccaaaccacagtcacctgctaatctcctgccactgtttctttatacggttgacagatgtacacccacactatagccacagagcaaaagcgccctccacatcgcagacttctccatctgctgcctctccactctggtctagtcatagaaagctataatacaagatgagactaaccaggaaggacaaggccccagaaagctatcaccttcaaagtccagctccagccaagggcttatgtagagtgaagcatgaatgttgccctgggagggacaacagggaaatccagacatccccagcagaggacccaggccaacagggagtgccagttctcataaaacagggcttcaagataccaggccaggatcctaactcaggcaccaatttgcatagaggagaggactgtgaaccccagaataaacttacctttgaggccctcacaggacacacacccctattcactcaagtcaagggtcccacccacacatcacttatgagcatgcccacaaattcttatttgctggtagcaggcagaagcagcaaagagaggaaaagtgacagagaggagaagaggggaaactataggatgttgtgtgcaccacagcatcttgactcctcttcatggtcacttctagactcaccagggacacacgtgagagggaactcttcagactttttaacggatctagaccttctgtgaaagctgcaaacctaagactaaatgttaccttcctgaaggtgattcttatccaaggcctcagttgctttcccacctactcattcctcccctgcctccagtaaccactgtctggctccctacttctttgagtttgactttgagacatcacaaggccatgaaaccttatagtgttcatctctctgcctggtttgtgttgcttgcttggctttcttttcttttctttctttctttctttctttctttctttttttttttttttgatttttaaggcttaatggttttctataccacatttttaaatccacttatctattgatgggcacttggctcttttcttatctttctgttgtaagcagtgtagcaatgaacaaggcagccggcatcccctcttcccagcatactgatttttcagcccctaactcagtgggattgcacacacacaaataaacaaataaatatatgtctgtttagttatttatttattatagtcatcctttaggtagttccagaagattcattggtcaataagtagatcctccaagcctttaccatcataagaaccacatagaagcatttacttatctaccctgggagtaacacagtcttcctcaacctaccagcctcaccaaactatgtatcttagatgactcccaacctgcaattacaccccaacacactcacattgtagcatggttttgttgtttgtagaaagtaattcagtgtgatttgaagagggtgggagtttaatgtcctctataaatggtcagtagtcatctcccagagaaagggagagagggagagactagctcactgacttctgggagaggacaaaattctaaagactgaaattcatgaactaaatattagaagcaaaagaggactgtgacttgaaggtggcagatgacactatggacatagattaaattagtgtcctctgcagtcaccttccctctcctcccctccacagggactcctggggctggaagctccaggatctgtgagctgcatttccttcccacaggaaactgctaaattttctcctgtggcaaaggccttttgggactgcaagattcctctctaaacatctaagacagatcctaaggggaggatcagagaactctgaatccaataaataaataaataaataaataaataaacaaataaataaataatctctgggttagattttcaaggcactgtaaaacctggttttctcttcatcaggcaatttgactaaatgccacaaacttagccataaaatgagcagtctgccctgcctgctcaagcttcccctgagatgttttctgaagggtgactgggtttacaacagccatcagctctgcaaagctctgctctgtacaccagcttcccagatggactcaaatgacaataaatgtatatgttgatgtacacacagatacacagtggattcaacctgaagaacggtacatcccatccaacctggctcagagtgcatgtagctgactgcactcaccatataattctggtatcccaaatcattatctaaatctacacagtgatgataaaagactctccaccgtatcacaggaataaccgtgtaacactaacatcaccctgagtgagtgcaaactcaggtcatgatgtgagtagtttgagaacttcatccctgccctctggacaagatcagtgtacaaagctttaaggagctttagtgagaatgccccatgctaaggatgcccatctgcaatagggtcatcaaaatccacaccacaacacttctcacccatcaggacatcttcattcagaacaaaatacaaacataaaactggtgttggtgggacatggagaaaataggattcctttgtactgccagtggagtgtgaacccacacagctgctgtggggaacaatctggcgagtcttcaaacagctaagcattgagtttccacgtgaatgagcaattctacttctaggtatctgctcaaaacactgaaagcaaggactggaacaaatcttcgtacatcagtggctttagagtaaccaagtacacagggattaaaaagtagaatggtcgctcccatgggctgggggggactttacgaatgttgttggtgcttaatggatgaggagttccagacggagaagaggagaaagtctcagagatggatggatgcacaaccatgtgaatgcacttacggccactaaactatgctcaaatgggctcaaatggggcccatggggatggcctaattggtaaagtgttgggcacacaagaataaggacccaagttcagattcctagcatccatgtagaaaagataggtatatctatataatcccagaagaaggattataggcatacacaggaggcaacagagagatttgggggaggagtgttgctggctgttgaatctagcagaaacagcaagcccaaggtacagaaagagaaggagactctgtctcaaaaaacataatgaaatgtgacagaaaataacaccgatgtcagcctccagcctcctctacacatacatgtgtatacataccatgcacacacacaaacatgtacacatgcatacatctcacacataacacaaatggctaaaatgttgtttgactacagaagatccatcagaataacaaagcaaatatttttgggtttttttagactctattctatcttcacaaggatgcagagaaatgggatctctcaaatacacactgctgacaagaagcaaaatgctaagacccgtccccctggaaaatatctggccatgcctttaagagagtaagcatatggtcacacaaaccagcaaacatactcctgcagatagatgacagagttgcaggttacatctgagcaaaagttgatataaagccaaccattgcagctttatgtataatacccaaaacctgcaagcaaccaaatgtcgtgatgatacaaacttattccacaaaactctatttagcaaaaagaaaaaaaaaaagtgtggctacctccatcacattggctacctcttgtgagcatcatattagatgagaaagaagtctcaaaagatcacatgttgtatgattccatgctatataaaattctcaagcagggcaggttggcttgcacctttaatctcagcacttgggaagcagagacaggcagatctctatgagtctgaggccagtctgaacacattgtgagtttccagaccagccatggaaaccctgtctcaaaacgaattctcagaacaaggaaattacagccatgaagatgactgctagcatttatgaatggtggaagaaaagtagggagatacccaaatatatcatagtttatctactcattgatgaaagatactgacaactgtcctccatcaaaagtttccaaatcccacattcccattcattaacacaggaccacatctgctcacttcagcctccactggaaacacaaagagactcccacaaacctgtcactttcaatcccaaactgacatggaagtgatggggaatgtaccgtatatgttcatcttatcgattattgaataaaatactgtttggccaatgagacagcaagttaggcaggactaggagccaaagaggattctgggaaatgtattagaaaagtggtgatccaggccggaagagacatagcaaggagactcatatttagcaaggaaaaacaggaactgtcccttttcccctttgcctcctccagcagcaggatgtgagccaccagcaaggagggacgccaataaggcttccgataagttaaatctaataaaatatatagatttatgataattaagactgagctaacagatgagaagtcctagtcattggccaagcagcattgtacctaatacaagtctctctgtgcattaattggggccttaattcgggtgggtggctggcataaagcgcacatgtggcggtggggctcgggcggcttttggtggaaagatttatcgtaacatggaagtaattctcggagaagataacatcagtctttgacatggtgtacatatccaactggttctacattctcctgccttacctactccaaccaaaaaagtcattcttaaaactccctttcccattcgttctcctgctccttctccttctccctcctctccttctagtccttctcctgcccatcttctctctctctctctctctctctctctctctctctctctctcctcccactccatctccctctcctattctccaccccttctctcactccctgtcactctttttctgctcctacttcctctccctcttcccctcctcctctggaaaagaaattgtggctgcctagtaagtctaagaatttgaagaatacagcacatcacagaacttgctacaggaggacccaggtatagtaggtacaggaggacccaggtacagtaagtacaggagacctatttcatcattactccaccctgggacagcaggaggcataatggattatttcatctaagatccttgcttccctacagtcctctggcccagtcaacacatataccctccctcagcctcaccatctccttggaaatttttcctgaggttcactagttaactaaagccagccctatacaagctcctctgagaggcaccccctaaacttgctgttgtttcagaagcaaattcagtatgtgtctatccagccctttgtcacagtgatcatcactaacattctcagtaatgaatccctaattgttaagtctctatggaaggacccctttttcccttcctctgtaaagctagaatcccaaagggacagtcaccaaactgcaggaatgaagtcttggggatctggtctgtaattccaaacgctggggaggaacctgcacaaagtatctacaactgtcatttttcttggtctgcaacaataagcagcttccagaatagaaccacaattgacctgcacaaggctggggttgccaccagatgccatcagaagacaacacgtgatggtgggaaattagcttgttacctggtatttgttcagagtgttcagtgagaattacattacaggaaaaatttaaattattctctgaggtggttcgggtggtgggggcagggtaggagttgacatttcaactgcaattagtaatgtttgcttcctctccatgcacttcccttcagacactccccttcctgctgagtggccctggaatgtctgagggcatgtcaatacctaggccagaagcaactgaattaggacttttaacctatggaatttgccagccttcataatttctaatttctcactataattactcactttttatctagtcttgtatttataatttcattctcctttctgaaagagcccttcaagaggtccaggctcataatctgtccccacctataattcactaagtacctggcacacagaatctatccagtgaattaatggaagcaccaatgtcaagtcaaatcacttagcatcactgacaataatgagtcacctgagattctagagaaatagttaacaagaaaacatattgtaagataccacacaataccctaaaccggcaaagcagcagctcttttttttttttttttttttgcagggctgtgcaccagaatggctatgaatactgggagatattactgaagaacattagaagctgttgttatttgaagtgcacatgggggctcaacagaaggctcagcagttaatgtctccggtcttccttgaatccacaatgagctgcttatagctgcctgaaactccagccccagaggatctgacaccctcttctgacccctgcaggtgcctacatacatgtgatgtatgtacataggcacacgcgtgcacacacacacattttaaaaaatctttctttcaagtgcatgtggcatggttcatggagactcttccttgagtccggggattctgcaagaatcccttaggttaggggagatcccgggcctgcaacttcaacaggacattctctgtcatgaaacagtcctcaacaaggctctgtcgacctcacataatgtatgcacacaatggccagatgtagtcaagtctcaaatctgggccatgtttctcccaaccatcaggtttgctgacacttatgattacagccccctcttaactgactcccccaactctttctgtgtacccagaatacaaaagtaaataaagacaatgactgccttgtcccaaacaatgatgctctcatacctactacgggaagccagaaagagagagaaagatgcaagaataacaatgcaatagtgctctagagccccagtcagggctctgtgggtgaggatacttcccaaaaggctgaatttaatcccaagaccccaggaggtagaaagagagaactgaccccagcaagagttcctttggcctccacacatgctgtggctcaagcacatacaaataaataagcaagtaaatgttgaaaacacttaagcatactctaggactagcctcggtcactatatatggatggaatgggctaaacttaaatcatttattacttaagtactgagcactgaattagtactgagaaatctgggtaccaaatcatttaaattctgccgtttggatgctttcccatttagcagataagaaattaaatgaaatgataacagcaaactccttcaaaacgtaaagctactttatgtctagaggacttcgctgaagatatgacattttagctgaaacattcatggaataaacttagctacacaaaaggacagaagcaggagtatgcccagaaaggaagcaggcacacagaggtcctaagattgaaagaaacagcatttgagagaaactgagaaaacactgtatggctagagcttctaatatgtgggctttctaccatcccacctgtatgatcaaaagccatttgaatcagcagcagctattgaaccaactggacccccacccagggacaccagcatccctcaaatggccttatagaaagtcagggggcatgcttgcttctcttccatcaacattcacagagagactacattgaataccacatcaggatatgttgaagggaaatggagggacttggataaagccctgggaacaagagaatggagacagaatgaagccagcctcggacaggctaagagaggacttgtctaaccagaacagagagagattttgaatgcagcaggagaggtgaacacaggccaagagcctgtgttctggggatggggtgaaatagagtcatcacaaaatagaagaaaatggaaactctgcaggggccaaagcaacaatccaaaagtgaattaggatcactgtcaggacagaaagaggcagtcccagtagcaggaggccataaggatgtgtcaactgcaggacataagaagactcagaaaaaaaaaaaagtggttttcgcgtgggatgcttgagagactggtgctcagcaatgaaaatcaggaagctgtaagggggctgctttagagaaacttgaaaagtgctttaaaaaatatcaccatctgggttttaagtcaaggatggataactaagcgataatggcaaacagactgtgtggaaaaagaagaggcggccacagcagagggcagggcaagaaggccacatgtgggtgtattcaaggagaagtcacaatagaataggagcagatgagctggcctagaagaagagagaggactttggagaaagccatgcagctggagcaggaaacacagctgatgcacagccctgggacactggcaagggagtggcaggaggtcagggaccccaacgggtccacttttcagtataaatcagaacacacaaatcctctgtggagcccacactctcactttctgtattactccacaactccagttactcttgacctggccccgcccacctgtcacctgccttctcccacacaaagtgcccaccactagcccctctaatataggaagttcctgcactctcctgggcggggcctttgtgccatctgacccccccattaggacactctagtcacacacctatgtgtacgtgtatgtacacatgcagagacacacaccattcattctccaacacagcaacacgctgctctagcacagccttgagctgctctaacacatatcatgacttgaattctcacttttgtttgtctgcattcccccattttctaaaaagaccagaggaaggtaagggtctgggacctctttcctccatctctgatattacagtgcatggagccaaatgaagacttaagaggaaggagaaaaagcagcttaaagaaaagaaaaaatgtgtgacctttctaagattggctttgatccaacaagatgcctaaagccggactgcaaaaagttgtggagaagaagccttaagacaaaaacttctctaaatcacacacacctgggggctaaggagacacataggtgcaccggtgtgaccatgccctccagaaaagctgatttttctagaatacctaaataaaacactttgaccaggtcacatttcagttcttctaccaaggttctcactgtggagactcaaaccctcaggcctgaaatatccccttagatggggtttatgtttacaaatgaaatgtaaaagccaaatggctaggccagcaagatggcccatcgggtacaggcatctgccatcaagcctgatgacctgagttccaccttggaaacccacatagtggaagtaggtagccaactcctgcaagttgtactctgacttgcatatgtgcacatggcatgtgccctcatccccatgtatgtacacaggaatgcacatacatataaaaaaaggtaatcaaatgtaacaaaaaaatcaagtcagttacttcggaattttttattgaaaacacaaaggtgtacattacccaaacttgtgagagggtcactgaaataagggaaacagagtggtgcagacttgagaacactaggtatttatagaccccaaagcttttcaggcatggcagggatgggcagggtggctgctggccaggcaaggtaaatagtccccctgctgtgtgcctacaacatgcaaagcaagcaaatgaaaagggaaagagaatttttaaaaagtaggccaaacagagagagtgggggaaagctcagttaagctgagaacaagagctcctcacagcaggccagcttcagcaagcctggcttaaacaacactggcagagacttccagcagctggcaatgggtgggaggatgctggagtgcctgtgtctaagtcaagatacagcatcacagacacattgcagagaacaaagttgcacaaagcaaacctgtggcccagaagttgactctaggagagacccttcctgattccactctctaagccatttgaaaagacaccatggcccatacaccctgacccctacatacttccccttcaggctttccccagaagccagtgaggacagtgaagagaagtgcccagaagtgacactgtgttcagagccctgtttattttagaatttgtatagaggtgaagctaatggaggggctctatcaggtttctaagtcaaagcttttgctagagtttgccagtggatctctattaaactatgcttctgggatatcagatcacagttaatgcatgtgggtttttgtgagcaaaggaactctcaaaggtcaggacttgcctggatgtagttaccactacccttgagagaaaataaaagagagagagagactttttttgtttggttggtttttttgtttgtttgtttgtttgtttgtttttcaagacaggtttttctctgtgtagctttggagcctatcctggcactcgaactcacagagatctgcctgcctctgcctcccgagtgctgggattaaaggtgtgcgccaccaacgcccagcaaaagtgagacattttaatgaccaaaaaaatgctgatattttcatactgtgaggttcaaggaagacagcagagcaggaatggcccaaacagcaccctttagtggccaagaaattggagttctagtgactgagcaatgggcacagtcactgtaatttatcaaccactaaggtggggaaaccccaaattcattgagggatctgccattaacaagtactaagcaaatatatactgtggtttttaacgcagaatctgtgaaggcaatgcacagagacaaaatggcagagtcaacatggcaaagcaaatcactcagtgtaggagctttaattcgtcatcagcaaagtgacagagactggtcaaaaacttccaaggtgtccttacaaacactaccccatgatgtggtcaagcaagaccagtcaggagtcgggggtgttaagggtcatgagaggctagtcatggggcatgcagagctacagacagagaaagagcaggcctcaggacaggatttccttcagcaggaaccagaagttggtgggcctctgtgggagtccggaaggagatgtctgtctggtgataccagaacaaagccaccaagtcacttactgcctcaataggaagcatcttcccagagctaggaaatggccctggaactcaaacagtccaaccagacaacctgggacctgtcctcagacccccaacagaaggcaaagacccagggagtgtgttcagtcaaatataatatacatgacatccataagctagaagatccagactgtcagaaagactgatggaggaggatttagctcggtcacctaaagcatggattatagattacaacttcatttaggacactgaatgatcccagaacaaccagcatccctcagtaggatactgaatgcccataaaataataatataaatataacatgcaataggaatagaagattaacagatcgaattgacaatgagctactgaaaaaactccactgtccaaccaaccagctgtatgcgacctgcagccctagagagaaatgatggcatccttctcagcaaagtccaccagtacaaaatgtcagaaagggagctggcagcatgagtccacaagcaaaaattcacaagtgcacctctggagatgctgcaaaaaaaaatctccgtgcattggccagagctagagaaagggcagaattgaagttttgtcttcttataaatgtgaggttaattttttttaacatactgctttgaaaaatgtacttcatcctcctcctactggtctcctactataaaaatggaactattgaatagtcaatcagtgccactctagacatataccagaaggtaaattagcacacagcaaagacacctgcccaccatgtttatgtggcagtatcacaacagtcaagaaacagtaccagcttaggttccaagtaacatggatacattttttaaatgtggtaggcattaaaatggagcaatattcagccatgaagaagaacaaaattacatcttttgcagaataaaactggaagtcaatatattaggtaaagtacactagactcggaaaaacagatattcatattttctctcttgtactgagattagtatttaaagagttaaaggagtcttcagccagaaaataaatactgtaggttggctgccaggcttcttctaatttatatctttccaagcttacacattcctgagactcacctctgctagcttgaaacccaccacaccacaatacccactgatgattcaagatgaacatgactacagcagagaacaaagagcctggctttgcagacctgtggcttggggtccagacccatggatgaatgaagctgctccaagactgcaaagaggatgcaatgtcgacttcccaacactgagcaaatcagttattggagatgctcaccccactgccagtcttgccatcatgctgctcctcagacctgaccatggtctgtttttattttctcacaataggggttcagtggaccatcctgctttactgcatttaaaaactagaatgagtccatggttaagcttaggaatatcctgacatccctaagagtagggcaaagccttcttcctaaagataagcaaacagaaacaacccccaaagtctgtaacaaacaacacaacagcatccatattcccttctgaaattgattcctagtagaacaagaaaacaattctacgtcctttctttgtgcttaaaagaaaatacaaaagattacctctttagagttgtggacacaaggaggccagcataacatgaaaatgctacatagaaactaaaaataatagaagctaaaattatgctggcacgaagtaaaaaaagagaaactagacacaacaaaaacataattaagttgaaaacatgcttccaaatttcagctcccatctccccaaaagacaaaacaaaagacaaatctagtccctagattgtttcataatgaaaaggaaaaaacaaaaataaaaccaaaaaacccaatagtggaagacacaaaagaagaaagtcttaaaaataaaaataaaaaaagttttcttcatggatccaaacaaagtaatggggaatttcaagtatatatttatatccacagataatctgtagttataaaaaaaaattctctaccatctttagaaagagttctccatagtgataccaaaatagaaacaccggggcattttaaccataaggacatcataagaactcattcaaacaactcccaggcaaaggaatcagaaattccttgtaagacccacttggatgagatgcttctttctctgagttccaagtagaggtggggaaatagtttccaccaacattttgccctctggaattattaaattatccagatgatctaattctcttggaggtaaatctcataaattagtttatttttaaaaagactcttgcagtgactaaaagttaaatttttattttaaaaatactaatgcctgtaaaaaagggaattagaaaaaaaaaacaggctttaggaaaataaaaattatataatattattgtgtcacttaagacaatatcctgatctgttatgagttcttcacaattcatgaagtttaccagggttattttccaaaagaaccaattaaaacaacagagaatgtcaaaactccattaaagcatcaaaatacatagataggatgcctcacagtcaacagaccaacactacaacactgaaataagtgctgaaagaactcgtgatcagattcaacacagatacagatggacccctggaagaacacacatcaaactgtcagcgaggcttagaactcatgatgagattaaacaccaggcttccaatttgtttggcttactctagttctaattgtgcagtgtgtgtacaaaacacaacacatgtgaattaaaaaatattaagggtttgtataccaaaatacagtgaactgtaagaaaccagacatgaagacattcaccccttgacatccatggtgcacaggtttcaggaccaattgtagatgccaaaatccacagatgctcaactactttacataaaatggcatagcatttgagcatttgcatattacccccatattatcctcctgggtactgtcaatcatctctagatttttttaataactaatttaacacaaacactatggacatagtggctatgctttattttgcagggaagaaaggcaagagaaagctctgcataagtacaaaacagatacaatttttcctataaatatttatgataactgtatttacaaacatataatgaaagaccagtgatgagatgatatattatttatgatttattaaagcttgcctgaggattcagaaagcaaagtcagccactagctatagagatcaggcaatggttgtgcacacctttaatcccaggaccaaggtaaatagtccccctgctgtgtgcctacaacatgcaaagcaagcaaatgaaaagggaaagagaatttttaaaaagtaggccaaacagagagagtgggggaaagctcagttaagctgagaacaagagctcctcacagcaggccagcttcagcaagcctggcttaaacaacactggcagagacttccagcagatggcaattgctgggaggaggctgggggacacgtggnnnnnnnnnnnnnnnnnnnnnnnnnnnnnnnnnnnnnnnnnnnnnnnnnnnnnnnnnnnnnnnnnnnnnnnnnnnnnnnnnnnnnnnnnnnnnnnnnnnnnnnnnnnnnnnnnnnnnnnnnnnnnnnnnnnnnnnnnnnnnnnnnnnnnnnnnnnnnnnnnnnnnnnnnnnnnnnnagtgaggacagtgaagagaagtgcccagaagtgacactgtgttcagagccctgtttattttagaatttgtatagaggtgaagctaatggaggggctctatcaggtttctaagtcaaagcttttgctagagtttgccagtggatctctattaaactatgcttctgggatatcagatcacagttaatgcatgtgggtttttgtgagcaaaggaactctcaaaggtcaggacttgcctggatgtagttaccactacccttgagagaaaataaaagagagagagagactttttttgtttggttggtttttttgtttgtttgtttgtttgtttgtttttcaagacaggtttttctctgtgtagctttggagcctatcctggcactcgaactcacagagatctgcctgcctctgcctcccgagtgctgggattaaaggtgtgcgccaccaacgcccagcaaaagtgagacattttaatgaccaaaaaaatgctgatattttcatactgtgaggttcaaggaagacagcagagcaggaatggcccaaacagcaccctttagtggccaagaaattggagttctagtgactgagcaatgggcacagtcactgtaatttatcaaccactaaggtggggaaaccccaaattcattgagggatctgccattaacaagtactaagcaaatatatactgtggtttttaacgcagaatctgtgaaggcaatgcacagagacaaaatggcagagtcaacatggcaaagcaaatcactcagtgtaggagctttaattcgtcatcagcaaagtgacagagactggtcaaaaacttccaaggtgtccttacaaacactaccccatgatgtggtcaagcaagaccagtcaggagtcgggggtgttaagggtcatgagaggctagtcatggggcatgcagagctacagacagagaaagagcaggcctcaggacaggatttccttcagcaggaaccagaagttggtgggcctctgtgggagtccggaaggagatgtctgtctggtgataccagaacaaagccaccaagtcacttactgcctcaataggaagcatcttcccagagctaggaaatggccctggaactcaaacagtccaaccagacaacctgggacctgtcctcagacccccaacagaaggcaaagacccagggagtgtgttcagtcaaatataatatacatgacatccataagctagaagatccagactgtcagaaagactgatggaggaggatttagctcggtcacctaaagcatggattatagattacaacttcatttaggacactgaatgatcccagaacaaccagcatccctcagtaggatactgaatgcccataaaataataatataaatataacatgcaataggaatagaagattaacagatcgaattgacaatgagctactgaaaaaactccactgtccaaccaaccagctgtatgcgacctgcagccctagagagaaatgatggcatccttctcagcaaagtccaccagtacaaaatgtcagaaagggagctggcagcatgagtccacaagcaaaaattcacaagtgcacctctggagatgctgcaaaaaaaaatctccgtgcattggccagagctagagaaagggcagaattgaagttttgtcttcttataaatgtgaggttaattttttttaacatactgctttgaaaaatgtacttcatcctcctcctactggtctcctactataaaaatggaactattgaatagtcaatcagtgccactctagacatataccagaaggtaaattagcacacagcaaagacacctgcccaccatgtttatgtggcagtatcacaacagtcaagaaacagtaccagcttaggttccaagtaacatggatacattttttaaatgtggtaggcattaaaatggagcaatattcagccatgaagaagaacaaaattacatcttttgcagaataaaactggaagtcaatatattaggtaaagtacactagactcggaaaaacagatattcatattttctctcttgtactgagattagtatttaaagagttaaaggagtcttcagccagaaaataaatactgtaggttggctgccaggcttcttctaatttatatctttccaagcttacacattcctgagactcacctctgctagcttgaaacccaccacaccacaatacccactgatgattcaagatgaacatgactacagcagagaacaaagagcctggctttgcagacctgtggcttggggtccagacccatggatgaatgaagctgctccaagactgcaaagaggatgcaatgtcgacttcccaacactgagcaaatcagttattggagatgctcaccccactgccagtcttgccatcatgctgctcctcagacctgaccatggtctgtttttattttctcacaataggggttcagtggaccatcctgctttactgcatttaaaaactagaatgagtccatggttaagcttaggaatatcctgacatccctaagagtagggcaaagccttcttcctaaagataagcaaacagaaacaacccccaaagtctgtaacaaacaacacaacagcatccatattcccttctgaaattgattcctagtagaacaagaaaacaattctacgtcctttctttgtgcttaaaagaaaatacaaaagattacctctttagagttgtggacacaaggaggccagcataacatgaaaatgctacatagaaactaaaaataatagaagctaaaattatgctggcacgaagtaaaaaaagagaaactagacacaacaaaaacataattaagttgaaaacatgcttccaaatttcagctcccatctccccaaaagacaaaacaaaagacaaatctagtccctagattgtttcataatgaaaaggaaaaaacaaaaataaaaccaaaaaacccaatagtggaagacacaaaagaagaaagtcttaaaaataaaaataaaaaaagttttcttcatggatccaaacaaagtaatggggaatttcaagtatatatttatatccacagataatctgtagttataaaaaaaaattctctaccatctttagaaagagttctccatagtgataccaaaatagaaacaccggggcattttaaccataaggacatcataagaactcattcaaacaactcccaggcaaaggaatcagaaattccttgtaagacccacttggatgagatgcttctttctctgagttccaagtagaggtggggaaatagtttccaccaacattttgccctctggaattattaaattatccagatgatctaattctcttggaggtaaatctcataaattagtttatttttaaaaagactcttgcagtgactaaaagttaaatttttattttaaaaatactaatgcctgtaaaaaagggaattagaaaaaaaaaacaggctttaggaaaataaaaattatataatattattgtgtcacttaagacaatatcctgatctgttatgagttcttcacaattcatgaagtttaccagggttattttccaaaagaaccaattaaaacaacagagaatgtcaaaactccattaaagcatcaaaatacatagataggatgcctcacagtcaacagaccaacactacaacactgaaataagtgctgaaagaactcgtgatcagattcaacacagatacagatggacccctggaagaacacacatcaaactgtcagcgaggcttagaactcatgatgagattaaacaccaggcttccaatttgtttggcttactctagttctaattgtgcagtgtgtgtacaaaacacaacacatgtgaattaaaaaatattaagggtttgtataccaaaatacagtgaactgtaagaaaccagacatgaagacattcaccccttgacatccatggtgcacaggtttcaggaccaattgtagatgccaaaatccacagatgctcaactactttacataaaatggcatagcatttgagcatttgcatattacccccatattatcctcctgggtactgtcaatcatctctagatttttttaataactaatttaacacaaacactatggacatagtggctatgctttattttgcagggaagaaaggcaagagaaagctctgcataagtacaaaacagatacaatttttcctataaatatttatgataactgtatttacaaacatataatgaaagaccagtgatgagatgatatattatttatgatttattaaagcttgcctgaggattcagaaagcaaagtcagccactagctatagagatcaggcaatggttgtgcacacctttaatcccaggactcaggattaaaaggtaaatagatctctgttagtgcaaggccaccatggcctacacaaaagtgaagagtaacagagctcatacctttgatcctagcacctgggatcacacacttttaatcccagcattatagaggtatataagacaggagcaaggtctcagagctgtcattcagcctcaggattctccagccacattgaggacagaatagcaatctgagattacagtacgaggtttggtggagccaggatcaccttttggtctgaggcaggggtaagagctagtgcttttctgatcttatgcttgaagcttgaaccccaataacagtctctgaggcttttatttatcatgttataacaagacgctccccaaaatacagaacaaacggtagcacaggttctttgtctgtacccatgcattttgtgcatttgctgggacttggtttaagagtggtttccattgtaacatatgctactgactttttattggcagaggccaagtagccacattggcttaagtcagtctgcaataatttgacatacaatattaagtgaaaatggcaagacacatcatagatatgtagttatagacagagatatgaagagtcatccatattaaatatatttaacgcttttcacctaatctaggacaccatcagttacaatatacattttatattctactatgaatgccatgttttattacatggaactacatagtcattaaatgagtccttcaaaaactaatttatgcacagattttaacatgtatcacagatatctttccatgtctttctgtgtacacaacagctttgtcttctaatgccagttcatttttaaatcaattattccatgcagtatacactgaaatgacaataatatgaaccactgtgaccaagatgacagatacacagggatagaatctgccaagacagagttaaggccaggatatggtttcagaaataaaggtagggagaaattataccttagaattaatgacatagcaatatttcaatataaaaactatctgaggtgaggttgtgacttattttcttaatactatgtggcatttgcttgtattctgataagtatatgtttaacaattagaagggttttcatatgtgaatgcttacttgggtcatttaaacaccttgtcccttatacaagtgtatcagttcttctcctgctctgtcctggccagtatgtctgtgtgcataatagctacggcaggagggtgacaagtacaagattctgtgactctacaacatgactgagtgtggagatgtgtctgtttgggggaggggagcagggtgagatcagtgcaaggaagaagctgagtggacagcaacaatgaggctggggagtttttcacagtttagtcttgggcccatcttttttttttaaactaattgtggcaggacccagaggacatttaataacctgtacgacatgatctggaaagcaaactacagaccttgagtaactcagaaggcagcattttctattattcagaaatccatttattttattattctgtcttcttccagtgaatacagtggtctatgcgatgtgtgcagaagggagagagaaaccagagaagatggtagggtgtgctagctgagtaatgaggtgtgggtggtagacgaatatgttaatatttttattaattgaggtttctgactaaatttgttctggccccttaatattttgctgtaaaccacggtttcacccacgcacacatccataacctctgcccaggcccatctctgaggaaggaggcagagaggatactggatgccattttgttagtaagaagacaattggcttagattgtatgggaactagtctcagaaataagctggaggcatatggaaaacatctgtcccctgcctgccacttccacacacaacttacagttgtactctaaattcccatttcatgttcaaagctaaaaccattatcggcaaggcacacctccaaaattacaaaaaaaaaaaaaaaaaaaaaaaaaaaacgcatacctccaaggcacacaagaaaaacacgttttgctattatcaagaaattaccacaaaataaaatgtatgaaaattccttatgaaagtaaaccagatgagttgcaaatcacatagcttttcaaaaagtactgaatgaaagataattaaagtttagattttgggaaaagaagccaggacgttctaaaaggccatacagaaacacctgatttagagagtaatattccatgtggtttttaaaggcctccactccatagtaagtaaaacattctccccccacttcagtcacaaggtttcaagttaggaaagggccactgggacctaaggcccagtgcttagggacttacataaagaggcacgtcattgcagctcaactccatgactcctgcatctgtaatggaaacaacacaagcattatggtgggaagcctatcaccagccctcagagtcctctgtggcccacattcagtgtcaacattatggaggaaggagtacaataattaagaaaactacagagatattaaatacacacacacacacacacacacacacacacacacacaaggactagggtcatagatcaatggtggcatgcttgcctagcctacaccaaggcctggagtccattcccaagaccccttcaaaaatgaaatggaaaagagacattctcttacataaaattattctccccaagaaaacacaatggcatcccttcaaaaactaaacacatgatcagtaatttgacatctgagtatatacacaaaagaactgaaaatgggctaagcagtgccaaagtgaggacagtagcctgtccatgggcaatcaaaatgcagtagacatatgcaatggaacaatattcttcaaagtgctacaatgtgaatgagacagaaagattaaaaaaataaataagtcaatcacgaaagaaaaaaatactgttgccattccacttacatgagatacctaaataggtaaattcatagagacagaaagcagaatataaattaccaagatccggaattactgctcaatagagacacaacttttatttgagaagataaaaacacagtcctaaagatgggtgatggtgatactacacagtacaaatgtgcttaatgcagctgaatcacatactcaaaatgatccaaatgatagatcttatcttattataacaaaggcatagaaaggtatatacagtatgtacctaaggcgaaataagtagctggaaataaatattcaaatcatgtgtgtaataacatatacatgatgtacatacatgcctacatacatgtatagactcatctttattctttcagattagtttccacaaataaggaaatcccatcactaatgactatcccagaatttggaatatttctaaaagccacagaggggcaacataaacattaggaaagcttgaaccccctggagtgggctccggaatgacaatctatttctagcaaaagtaacttcatgagctggacctgcggcttccagagtctgagaaagacatctcatgaaagataacactaacaagaatataacagaatagtcttagcatggattgcttagtatgaaccgaactgttcgtcggttcctgtcagaaaatgaaaacaatgtgcaactcaagagccctgacaaatggagggctgccaaactccttgttatcttttgtcttttctttttctttgttttgttttgttttgttttgttttgttttctgagaccaggtttctctgtgtagccctggctgtcattgccctgtagaccaggctggcctcgaactcagagatttatttacctctgcctcccaagtgctgtaattaaaggttggtgccaccacagtcagccaaactccaaattatcaagacagcactttaaaagtttagttcaactgccgggtattggtggcacatgcctttaatcccagcacttgggaggcagaggcaggcggatctctgtgacttcgaggccagcctggtctccagagcgagtgccaggacagccagggctacacagagggaccctgactcaaaacaaaacaaaacaaaacaaaacacaagtaacagtatacagactgagcaggttgtatttgtgtgcttgggagtgtatatgtatgctacataagttaatggaaaaaaggccattattttgaatgagagcaagaggagtatatgggacagttttggagggaggaaggggaagggggaaatggtgtaattataatatcaaaaactgaaagaaatatttttttaagaaatagacattttctgaaactctgcttatattttctagacatttttttaaaaaggatcaaactcaaggctttggtattctagacaagcactctgacacagaactatattccagtccttggtctttaaaacagagtcttagttataagcccaggctggccttgaactcatcttcttgactcagtctcctaagtgctttgattacaggtgtacatcacagcatctggctagaatttgtttgttcattaaatacaacaaaaaaagaagtggtccaaggggaatgggaagagatgagagtggatgtaattatgaccaatattcaaattgcattatacacatatataaaaatgtcaaagaatactgcatgtgcatgcacacacagggcgtgtgtgtgtgtgtgtgtgtgtgtgtgtgtgtgtgtgtgtgtgtgtgtgcgcgtgcgcgtgcgtgcgcgcggcgctctcaaccattatgccaagcagagtgttaatccgctatcctgttcaacatgactcagtagctggtgttggttcaaacttcgagtatctgaactgaaatagtttattttaggcatatttaaacacagcacaatttggtgagaaattttttcctggtgataattaactcaagtctatgtgcccaataaagcttaagacatgactacatcgagaatctttgcaaagtacatggggcatcttccataaagatgggttctatagatggactaagaaaaccaagctcatgataagggtcttggtgaggaaggtcaccaggccacatccactctcagccttctaggcggaaaacatctctttccctttgaagaaacaaccctgcatatttaacattcctggtccccctagtacttatctgtgtgtgcaagaccctctgtgcctctcacagaatacctttttaaatatgttttaaaatccaaaagaatgaaaaaaaaaaacatttggggtgagaatgtgaagatatattctgaaagcaaattattttattaacaaaaataaattaagataaaataaaccatgaataagacagtggctccgacaaagatgtttgttttggtcctgggggcctgggaaggtatgcgcatgtatgtgcaggttcacaatggtcagagggagacttccagtgtcagcttatccctttaagacagtctctttactgaactggaagcttgtctttcggctggccagagagctcccagggtctgctggtaccaacttccaatgttggggttacaggcacaggtggccatacctagctctttatgggagcactcgggattctaactcaggtcctaatgcatgcacagcaactcttaacaaatgagccatcctcacaaccaaatgagtcatcttcactgccccgatgaagctttaaaagtgtcacacctgagatccattcactttgtcatttgtgaacaaaatgctataacaaagaacttgaagccaaaagcacacagaggtttacaaacctgtagcctgtaagaatggatcatttcacagaagtatttcaacgcactcagatcattacaaattctacaggaagtagtcataaaggcctttaccacattggggaaaacaggttatatggtggcagtgtactttttaaaggtgtcaaacaaacatgcactgcctatttttttccttataaatacagaagtactccaaacttcctgggattcctaaggtgggaagtctctagttatattagagatttggggggggcactcaaatgacctgttctttccagaaagaagtagtgctataataagtggaaaaagaaaatgcattccaaaggttgtagacagttgtcacagtgaggatgttttggaaagaattagttgggcttcctcctcctctagggtctagcctagtaaatggatggaactagaaatgatcctactgatcgaggtggcccagacccagaaagacaaatgtcacgtgttctctctcatcagaagctcctagctccaaatcttcaggtgtgggaacatatcctagagttacagaaagtaggaaattaaaaagggacagttgccatgttagggatgtgggggaccaatagagagaagaatagcagggtacaagagatctgattaggggaatgagggaaaagggaaaattctaaccagggaatagcaagggagataaatatagaaggaggatgatgggggggaaacaatagtaagaatgtctgaaaaagtcatagggaatcatactattagctatttacctaaaaaaaatatatatatatatatatattttatattatatatatatatatatatgtatatatgtataaatatatacatatatatgaaacaagctaggcgattctccctccctgagccaaagatccctggaggacctacctctgcctcccatgccaccatagctgtccaatactatgattctttatagtaatagtgtcgaatattgtttagaacatgcaaaagacttaggacaccacctgattaatctttttctgtggagtgggaaccccacaccacacatcaaacatgagaagcccttttttgagttgttgaccagggctgtctaagacactcccaaaacatactgcctattgctgttgccctttggttacccccaagaggtggaaggtaagtgactattgctgaagacaccatgtacttcccgaacagggctcagaggtcctcagtgggaactgacttgaacgcttacactctgaggactaacttcatgatagcagaaggaaggacacaaccaacaactggtctacctagccatagcaccatgaactacaacaactaacatggtacaataactctgagggttagtgtgaagtcatggatcttggaggagaaactaaaaagcaccactttactaaaccagcactatctctaattcattctaaatatttgtccttatacccacagacaagtgtagtcctcccccttttgtcaatgaaatgtccctttgcaatagacagactatcacagagagccacaaccaatcaaaacacagagttgtggagcccagtcccagaggatacatctacaaagcaactcctacagttcaggaaacattgcaaaagagcggtggaaagattaaaacagccagagggtcagggagtttgctgagtttgctgagtctccaagaatgtcagaagttacactcatatagttccaccaacatgactgcctaaacatgagctaaacaaggacaacagcaatagacatccatggtggacaggggcaagatcaaaaggcctcaaccatacacaaagaactacgggcaactaaagaacgctgagaatgggagagatagtcttcttcagggaagagcacaccaattggttatctaataccaaatggttaggcctgaaaacatatgtacagataacaatatacagaactagtaggttgtatgtagggataatatgtatgtaacaacaattaatgaaaaagacactatgaatttgaaaaagagcaagaggtatatgagagggcttggagggaggaaaggagagggagaaatggtgtggttatattataacttgtatgttatattacaatttgtatgcttgtgtgcatacccacggtttggagcatttgatacaaagtttgcaattacagtagccctcacatctgtactctgtaaattttggggaaatcttttttttaaagcttccaagaggagcatttcctatctttcccgtttcatttgtttgatttatacaacacctcctggtgagtttgcagaaggacagacagctgtcagggatggtgagcatttctttactgacacagagaaggggggcttggactggaatctaagtccctcagtcctgatcagggcagtgagcagagaaaggctttgcccaactctgtaccatagggaactattttctcgtcctcaaaaactccaaacctatttcaaagtagatagcaatgagaaacaaagactccaagcacccagctgctgtttcacattgatgatttttagggaataaacaaggaaggttaacacagaaactttactaccatgtttaatccttatagctttctccatttttacataggctataccaagtgcaccattgtgttagtgtagtgtataagtaaacacatacatacattaattatgatacatgataacccttttttttcttaatagagtacatactagcattttgaaaatctgcttctaaaaaaccaggcccttccccattggtcaggacttcctatcagtcttctttcacttagtccaggtgggaatggctgatgggggtaagggtcaactctaaggtgcaattctccagtgcatgtgacctgcacccagggtgaggtggtgagtgtgatctgcacccagggttaggtgcaccttcacctggcaccatgaaggacttgttttctccatatatcactcatcagtccacataaggctaagggagacagagctgtctcggctttggtctcaacagaaacatccaagcccagataccacctgttactggttttgtaccttctgtttagtaacttattaaataatcttatttcttccagctcaacctcttggtatttagtatagcaacttaaaaaccactttgattaatattaattacattttccagaataacccctttgactccttacgcaaaataatcttaaactaaaatatgtgacattagtttttgaaaaactgggtttccttgaaggttttaatattctgtaaatgtattagcttaaatgtctggctcttgttactgtggaccttaaactgttctgtttttagctttgtgtgtatgtggtgtgtgattgtaagaacatttgtgtgtgtgaataagttcacacatacacaccatgatgcacatacagaggtcagaggacaacttcagatgctggcccccatcttctgccttgattaggcagggtctcttgtgtgtgtgtgtgtgtgtgtgtgtgtgtgtgtgtgtgtgtgtgtgtgtgttttcactgacaggtgggtttctggggactttcttgtatcgtcccatctccctaaaggatctctaggattatgtgggatctgggtattcaaactcatgttcttatgcatgggcagcaagtgcttcacacactgaaccatctccctaatcctgaaactgatttaaaggcatttctattctgataaaagtaatagagtccccaatttcatcccaagtccttctaaaattcctactgacatttcctaaatgagttacagagaaagtatttagggaaaaaaaaaaaaaaagatccacccaattcaactgtcaaacttcaaactggatattatttttaaagtttattcccctttgggttttcctcacatgaactcctctttgtccatgggaaggggttctgagtcctgctgtcccctcgctaaactatgctgggtctccttctacactggtggttctcacccctcctaatgctgcgatcctttaatacatttcctcatgctgtggtgagcatagcatgaggaaccatccaaccataaaattactactgttatgaattgtaatgtaaatatctgtgttttccattggtctcaagtgacccttgtgaaagaatcgctggaccctcaaaggggtcacaacccacaggttgagaacaactcttctacaccaaatttagtaatcaagtaagtttgtattttgccaggccaattgtagctgcacttggcctttagcatctccctgtataaatgtcatgttccagcttctgctgtgtttccaaggcctgactccctcctataacttctaaatggttatgttcaaatccttaaaataataataacaataagaccacattttctaaaaacattttgggaaaataaatgccaaaatatttccaaaaatctcacagaaaccaaaggatggtttggactatagtccataacatttttcttatgtttgtctccaaaaaggtaaacaaatgttactaatgagatactaaaataggcttatattacatatccaaatatcaaaaaaatctttgattgctggttaactctaaagaaaaatattagaccattttgagcaagctaaatttgtaaagttaggaagaaaagcaaatggagcactcaatttgcaagaaaaaaattcatgccctcacttaaagaaattccgggtttctaactcttgtacctcacctccaaatgaaatattcatggatgtaaagccatgacttcattgtttgagtgtggggatttcttggggttgttcatttgtttgtccatttggagacagggtttcaccatttagcctgcctggagttcactatatagaccagactgactcaaactcaacaaagatccacccacctctacctccaagctgctaggaaggcctacaacaccacacccctcagagctaggtctttaattttgcctttgaatatgataataatcaatgtcttacattccttttataaacccatagcaatgtgtcactataaatattagtaactaaactcagaaagctaacgatatagcacaccccatgccaaatattttacaaacatggcagcctgaagaagagtgtggaaaacaaaatcttgaacatgaaaacattctacacctaactcacaaaattatgtgcccagtaagtgccctccccactcctccactgcctcttccctccactcagctattacacttctgcagagcaacaggcttttggtagtttctgtgttttttgtctcactgtgatttgcaaatggtgtaataaaatataaattagtttaaaactcaaaaggctttaaggcattaattttttataaagttgagaaaaacatcattgtttaagttttatatatgaagcaatttatcaataagactgaggtagcaagaaacacagaaaaaatcctaagacagccgctccaaacatattaactttaatgcaaaagaaatgaaaagtgtgtctaatcaaatggcagcataacaatgctttgaaaattaaaattgtgatgtgcaatcacttttggcagaaatatgcctgcaccatcctcaatcctacacagacagacagacagacagacagacagacagacagacagacagacacacacacacacacacacacacacacacacacgagttcattctttgatcactgtctgggttagcacaaagttaaaagtgaaaaatggcagcctgcataagatcccacagcaaatggcagagctggtacccaaatcaactgtgacgctaatggagaagggaaggacagtacactctggctgtgaggccaagtctccgagacagcctttgatgccagcacaatggaaatgcgtaaggaaaaagcatttaggcatgaagctactattgaatagacaatgctgactatataaacctgtctcagactagaatgatctatctgtcatgcaagtctcaaaagctgtaagaggaatattaaactatttcataatcaccgaggacgtctctgaagattagaaaggaaacaacaacacagtaactcttcaataggatctcattaatgcaaactaatgggggtgggggggcagggaggaataaggagagccagtctgaaatagtgcagcctaaattagaggttgtttataaagtacaaagaggagcatgagttggccgctaacagaatgttccgccaagcctgtcacactcatttgtatttctcaagatatatttgcacagagacacagtgattaagccctttaaaagcttttcccaaatctactgaacttttgctgattctgtgagtctccgtggactgtttacagtcaacacaaagctccataaccatccaagcatcctgaggaagatgacgactttcaacacctcaattccctccttagcaagaaatctccaaagttcctcttgaatgctcagagtcaactcatcgtggactgtgtgtaaagcatgctgtaggctgtcttgggagggacactaaaacatagaagacattatgcctgtcacggtgctcacagcctggtccacatgataggcaggaagatatcagaaatggcactggtgactggcagaaggtgatggtgggaagccagcataaattgacaagggagtccttggacagaagggggttcaatatgaagacaggcttgatgcagacacagagttcaagaggatgaagccagagagaacaacagtgacctcctacatctatacagaatccatccctacaagagacatcctgtaactacacagaaggcatccctaagtcactcactgtgtcttgacagacagaatggagctataggggctgaggagatggatcattcagtaaagtgcttaccacacaagcatgagtacctgagtatggatccccagcaataaaaccaggagcagcagtgtgtgcctgcaacccctgtgctgagtggtaggaatggaggtaggaggatccctctggctttctggctagataatctagcagaatcaaagagagaccctgtctcaaaaaagtcagtagagtgatagggaaagattcccatgtcatcaatcactggcctcccatatgcttgcacacatgcacacacacacacacacacacacacacacacacacacacacacacacacacactacttacatagaaatgaaagggatgaaagggggaagggttctttgacagggtctgatggggaatgtccttctgtgtatgtttatcctattggttgttgaataaagtactgttggccactgaagaagcaaattaggtgggattaggagtcaaggaggattctgggagatgtactaaaaggaagtcttgtgaaacaggcaggaagtgacatagcaggcagacatatatataagcaagagcaggaggaagaagggtcctgccaataatactccctgttatatgttacctttttgcccaataacatgtatcccagtttcctctgctttcccctcatggcagacaggatgccttattaaggtcatgggaaggcctgaccctgacagctccaaatttgacacaggactcatcttgaacatctcatttccattttgcttatgctcaattccatcttagaaaatcagagcaaagacacaccgggtgagggtctaggccctgctccaaatgatatgacagactttgtagattcccccatggaaggccgaaccccccctggggagcaaaaagaggttgggatagggggtgcagtgtcaggggggtgacaagggaggaggggaggaagagggaactgggattgacatgcaaaagaagcttgtttctaacttaaaattggtctaattacaattataaaaataataataataataaaaagaaaatcaaagcaagagaacaagcaaaccacacaaagcccggctgctaaaactaagctggcaggtagggccaccccaagttcattcattttcggatgtcatgagaaaggttgttttatttattgtagctattctgtctataaaatgcaaagcagcaacctggacaaagagaagacaaatgacacatgcctgagagagggaacatgaagtttaagttcaacacaaagccttactaggcaacttgctttggctcactctcattttacaagctaaagaacctcccctttttaatttggtaaaagggaaggtgactttttctgggacctaatgtggaatttctagaaattaatatgttaactaagccatgagcttgtaatgcatggtctatgaatgcactttatagagacatgaactccatgaaattaatgtatgattttatttatatgtatttttctggcaagagtttaaagcttacattgggttctcagtggaccattaaaacttgaaaaaaagacaaaaatatatcctaccaaaattaatttcttgctttgtgaaagctcatgttaggagactgaatggatgtagtatgggctaggggaaaatatttgccaaacatagacccgacaaggaactttcaaacaacctcactggcaaatacacagaggacagagactaacgtttcactgcagagagtacacagatggcaataaacacatggcaagacactcagcatcattagccactagggacatgccaattcaaaccacagtgagatcagcacctgtcactcaacatgaaagacaaacaaaaagggtgcatgccctggagagaatggggaaacaagaccacactgctggtgggataggaaagggtacaggtactatggaaaacatcaggggattcctaaaatctaagcacagatgtgccatcagcaggtgcactaacggagaaataagaacccccgttacacaaggccccagatactttcatggcagccctatttatagcagcctcaacactagatgatcccagaagtccttcagcagcatgacagttcagcttcagaacagagcgacatatgcacagcagaaacatgtggtcggcctcctcattcttgggttctgcattcctgcaccctaccaaacacacactgaatatgcacttgggcttattatggttgcatataaactaaacttgtacagatttttttcctcatcattcttcccccaacaataaagcattacttgcctaatgatgataggaattataagtaatctagaggcgagttaaatatatgggaggagtcacatgggttatatgctaacacaatgccatctctataccacttgaacatcctccaatttaggaatccatgtgaagtcctaggccaatacctacccatgcaaaggaacagccacaccatttaccaacacaaaggaggaaagtggtggcatggaaaaaacttcaggaagtgagactagagaaatggcttaacaatcgagagcatttgctctaacagagagcctggattcaatttccagcattttgtcaggcagctcacagttgcctctaactccagctccaggaggacctgatgcctcttgcctccataattgcctgcacttgtgtgtgtcacaatcaataataatgtaaataagactttaaaagtttcaggaaggtatagtaagcaataaaagccaacccccaaaactggtaggtaatacaatcctataaacaacatttgtgaaagaaaaatgtcaatcagatgggaacagtttgggagttaaaaaacagcagttgagtaaagatgtaggaagctaattatgattatagaaggggaaaacacagttgaggtttcataaccattcaatgtcttacatgatagtagacatacaaatttacacaggtgacaaatgacacagcacagacattgaaaactcatgctgactcatggaagaaaagtggaaagcttgaataaggttgataagatgtatcaatgccctccatgcttgaggtttttttttcttaatttcactatttaatatttattttatcttgtgagtgtatatatcctgcatgtatatatgtgcaccatatgtgtacctagtgcctgaagaggccagaagagagtgtaagaatcctggaactggagttatagacgttgtgggccaccatgtggatgctgggaagcaaacctgggtcctctggaagagcaaccggtgctcttaaccacagagtcatctccccagtccctagagaggtgtgtgtgtgtgtgtgtgtgtgtgtgtgagagagagagagagagagagagagagagagaaagagagagagagagggagagagagagagagacagacagagacagagacagagacagagacagagacagagatgggggggggctgagtgcagcaattcctgtggaggccaggaaagagcatcagattcccctgaagctggaggtacaggtggttgtgagccatctaacacgggtgctgggaactgaacaatgtggataactacttaggtagaaggaagaattgccaagaagactgtgaaagggagataccacaggcaaaagcaatagacagaaccactagaaagcataaaggaagatattcattgagctacaaagatctccagagcccgcaagaaatatgtgtataaggcaaatcgaagaaagactttgtcaaaaccccaaaataatgtcacataacaagcataaatatcaagcttgtagggggtggggttaaggtgacagatgtgataggaattgtttttaaaagaaaactattgtgggtggtgccagatggatttgaagcaaagaaaggccaaagacaggaaaaccaggaaagggatactgctgtccctcagggagagatgctgctgcccctcagggagagatactgctatccttcagggagacactgctgtccctcagggagagacactgctgtccttcagtgagacactgctgtccttcagtgagacactgctgtccttcagggagacactgctgtccttcagggagacactactgtccttcagggagacactgctgtccctcaaagatgccactgtccctcagagaggcactgctgtccctcagggagacactgctgtccttcagtgaatgacctgaatgctgaatgaaagcaatgccatagaaataactctagagaccttcaagaaagaaaatggacagccttgttaccaagttaattggagagcctgggggtttctaaggtgactcttggggtcccagaatcagaaaccgggtgtgtggtatgctactgaccaggattcggatgcagagaggaggagaggcagacatcaagacagataccaattactaaccatgggttcccagaacccacaggaaaacggtttcataccgtaacaatgaattttagaatttaagattaaaacaacaacaaagagtttcccttttccattgactactataagtgtcaatgacgttagttgaaagaaaatttcaactaacaaataggcttttttttttcaacctgaagggctgggtatgtagtgcagtggtgaagtggtgagtgtgcacaggccctagaactgatctgtagcactgaaaattaatcctgaactcctgaacattagaaatggtgtaggtaaacatcagaccccacccttgagataattagagacaaactcagtcacacatatagttaacaacaatctcaagctaattctgacattccagaaaatacacagtactgtgtaataatccccttggtgtattctctagagaagtagtacttagtttcctgttttcaaaaatgatctactagataaaactcatattctactttcccttgctattactaactcgttttaagtcaaatagaaaagcaacattattcttacgtgacacttcaaaattattgtttaaaaatgttcaacctgcatggattccattaggatgaatggctttattgtatgtcacgggagcactttgttggtagtccacaccaagggaaaccaaataaaaaggctttgtctttccggccgtcttgctgtggacaagtgggtgagccttaacattgaatactctccaaagcatacactgcttgtagtgaggcaggtgaactcgggctttttccttcttcatggcatcaactcatactgtgcccttgcacccaaatgcccctcctcagctcgtgtttactacgatttgaatgtcactatgctgtctcagacaacactgagttcctaagttgagtccccagtgtggggacgaagagggaggggatggaaggggcaggggagaaggaacaggaacaggaacaaagtgttatgctctacagagcctaaggggacagacatcaagtcaaggtagattttcatatgccatgaactgaaccaacactgtgttccagaacacacaacctcaaaaattaatagggtgtgaagatccatgcacagcagaccaatagtcagaatttgatcggtgcttctcatcacaatattagccctgttgattttcatctcagtcctcttcccagaaaccatctatatgtatacacattgtattggagtcaccagaggaaggagactcagctgaggagactcctccatgggatctagctatgaggcattttctcaattagtgatcaatgaggaagggcctggccctagactggaggtcctgggttctataagaagacaggttgatgaactgaactggaatccagatgcagagaaggacgaatgaagagcaaaggggtccagaccaggctggtgaaacccacagacacagctgacctgaacatcagggaactcttactccccagactgatagctgggataccagcatgggactgatccagaccccaggaacatgggttacagtgaggaaaccttggaaatctacgggatctcctgtagtagatcagtacttatccctagcataggtgtggactttgggatcccattccacatagagggatactccctgagccaagacacactggggtggacctaggacccatcccaaaggatatgatagactctggtgacaccctatggaaggcctcaccatccagggggagcagaaaggatatgtgataggtagggttttagttgggggttgggggttggtagaggaggacgggagagagaagggaactgggaatgtcatgtaaaacaatcttgtttctaattcaaataaaaaaaatcagaaaaaaaaaaagctcaccctgagaaaaattttaggctacccagtgtagttgctggtgggttcatgctatacttaattcttcaagtacttacttcataacattaaataaaatgccatttactgattaaaaaaaaaagaagaagacaggttgagcaagccatgaggagcaaccagtaagcagcacccctccatggcctctgcatcaactcctgcctctgggatcctgccctgtttgagttcctgtcctgatttccttcagtaatgaacagcaatgctggagtgtaagccaaataaaccctcaccccaacttgccttttggtcatggtatttcatcacagcaatagaaatcctaaccaagacacacataaacacaaaccttttcctatctggtctcttattatctttattttatgtatatgagtgtttgcctgtgtgtatgtatgtgagccatgtgtgtgcctggtgccagcaaaaccagaagaggatccaggtcagatcaccatggaaccagagttacagacagttgtcagcctccatgtgggtgcgaggaactgaatccaggccctctgtaaaagcagtaagttctcataaccactgagcaatctcgccacccatttagttcccactttttgctaaatgattgttaactgagtgtcatgattaaaattaatatgataatagatcctgttgggtaaaaatcttagtttatctctatcagtataccacgactcaaaaatgggaacccagaaaaaaagcaacatgcacagtttgagatgcagcttattcaagaagcaatcccacaatcagacctcttgactaaattacagaaaacatgtaatttcctgaggatttacacacatgtgtatgtggggcagttagggtgacctaactcacatgccacaaacttgtctactaatgtgttctataaatttagactacacgctgtgggagaaatgtcattatagatgaaagctcatttaacactctgtaaaacatagatgtgaccggcacttcacagagtgtctagtgaaattccggccaagtgagcaatttattgatcgacaagcatagcaccagttccagacaccagccattatctacttctctgttgtgaggccaggccacactctgcccaaataattcacctttaccttttgaactatattaagagaataaacattacattacaattttaaaacagtaattccatctgtatgatgctaccacactttggacagaaaaatcattttctgctgtgaaagaaactccttcatcaactgctcagagattaggcctttgggtggcttgcttcctttttatctctgcaccccaaaccccaccccaccattctatcaactatcggttttcccatgggggttccatttgttcctagttgctggaaggtacttcctctttctctggtacatccaacccctccttccctcctcagcatgctcagctacaaaccctaaggtgagggaaacaaggtgattccaggaagcccaagttctatgggaagagatccataatagctaaggctatggcttcaagaacattaaaaagaggcgaggcttgctagcagagaacccagaggagatatcgattaagatgccagaaagtaactgaaaacacacaccaaaatgaaactggagcttacccagcaggtgaagcttgtaggatgacctgagaggaacttgtccattgaatttttacagctctcctttctgctatattactgctttaataacctcagggccttactggtcagaaccctagctaaactatttcaggaattactttaaatgagtaatagaactcttcaaattataaggaggttctccaaaagccataaatactgtcataaatttatgactaagaatcttcccctgaggccttgtgaggggtttcaagagcccagaagatccacttctaacaggctctgaggaaggagacaaaatcttgactcatgtgtgacggggaagaaaagctgaaagtcctacatggggcaagacacacagagtgacacctttagtcaaataataattaacaataatactagaaaaaatatggcaacaagctaaagggaaagaaagaaaccattttccaagcctaagctctaagtctgaaaggggggagggtcccctcagatactctaactgaaaaattaacatggaaaatagttccacactacaagcacgtgtaggctaactcagaattccaggattcccacagttatcatctcattggacacagactctcaacagcataaaacactcagcaaaactctccatctccaaagacaacataaaaagtaaaaatctgtcctttccaaaggtcaaataataggttaaccaatcagcctataagtcaatagatttaaataaagatgttttgaaaaccagtgaaaacattttaaaaaatgaaacagggtatcatccagaaggatgatgtcaagatgactaagacgcaaaaaggacttcataaaaaaagacacagtttaaatgttcattgaattagttaaatagaatagtgaaaagtcaactagtacacactggattttgaatcttaagaaatgagtccccacaccaagagagagagaaaaaaacagagaaagtgaaaaagataaagatccattaggaaaaaacaaaatatagaataagcccaacatactttatataggagttccagactgaaagagtgggcaatgcaccagaagaaatcacaagtgttcttttataatttctttgaattgacaaaagagaatttctcagattctgcaactatattagcaccacaaatccatcaaagcaaacaaatcttaggcaatttgcagagtgatgtgtgatttcaccttaataatattttggatggtgaccacgaaaatacagaagtggatgtggtgtcactcccctctggtccctgaacttgggaggcagaaattggacaactgggagtttggaccagcctgggctacattttgagatcaaaacagtaaggaaagaaatagagaaatgtcaaaaccatcaatgctgctcctccacaatgtggacttgtggggaaggacacaagcatttacatgccttttaaaaacacctctactctctgatttgtgctgaccacatactttatctgtaaatttttatttgtattttttgtttaagatttatgtattaattatgcatacagcattctgcctgcatatatgtctgaaggccagaagagggcaccagatctcattacagatggttatgagccaccatgtggttgctgggaattgaactcaggacctttagaagaacagcaagtgctcttaacctctgagccatctctccagaccctgtaaattattttatttatttatttatttatttatttatttattatgtatacagtgttctgcctatatgtatacccacaggccaaagagggcaccagatctaattacaaatggttgtgagccaccatatggttgctgggaattgaactcagggcctctgcaagagcaggcagtgctcttatcctctgagccatctctccaaccccctgtaaattcttaaaagcaagttaattataaacaatttctaatttcaaatttaaattgcaaagtgaagaataatgtaactatatatttaatatgtagtttatatttaagttgtatttaataagtcttaaaattttaattcttaagtccttcaatcttttaattttttaaaaaaactaaaccaccacaaaaaggaaagtaaattaccaaactctactgcactttgcgaccccttatctgaaaaaaaagcatctgtttttcaaagctgtgtcaaagacaccatctgcagtactcagtctttactataggcagagtcctcctccctggctctcacacactgtcctctgaaattactgccaccatttattgccttttgctcaaagcctgtcagcactatactcatccccctctgccccctggtgtttcttcttctgtgggagaaaacagttcctttgattatttccccctcacatcacttgatcagatccaaactggtcctcttttcccaaggtccctactattatcaaatgtactaacaggctagggtagagtgcttgcctaaaggtactgggcctctgaggctcctaatcctagcccactgctgaatgccttctctcaccttccccacacccattcattcaccaagtggtggtcaatgctgttcccatctccccttgttactacttcatccttattgtcaatctggcagccatacaccttcaccaccaccacctccaagtctatgctaagagcctggtaagccatcatcaagggcatccatcttgggaactagtgccaggtttagcagtcagaagtcaaagtcactgtttccaccctttattcctctaatgggaaaatggcccctggtcaccatttgccacgtaaaccctcccttagccaagactagctttccatgtgtccccatccatgctctacagagttcaatcagctccaacctatcacccccatgagttccttcttgcctagtctaatattgtgtggtatgtgtcattagaggttgaatgttggttaagcatccactcattctatgacttcatgtttcctgacctgtttcttagttcatgttgcaaggatcaaatggaacccaggaggaaagacacctggagaagtactgacactctgaatgtacttggcaaatcacagggaccattctttctctctttgtcttcccaataatggtatcttcatttatcctgaaatttagccaacagctgacacagctctgtttgctaattgttcatctcatcttccaattacaatcttcctctaggatccttctctattctctgtacctagcaaaactgacttaagtgagtaagttcgtttgttagactctttgagaaaggccagaggacaatggcaattgtttagaaaacatcaagagttttctataatatttgggtatctgctgggtatcaagatattttatgttaaatatcatatcattgagcaagagaagcaaaactctcagcatttccgaggtttgcaatttattgataggcaataagtagtgtctaaaaagcaaatgttatagcactttagaaggttgtaggaaagaataaaaggcagaagagattggcaagggtgtgctgcagattatttgtttaactatgtaaagatgtattgctgttttaccttgtctgcctaaggcacatacgtgattgatctaataaaaagttgaaaggccaatagggaaggaagaggtataggtgggacttccaggcagagagattaaatagaaagaggaattcaggcttgagagaagaaagaaaaagagacaccagggtccagacagacagacatggaggaagcaggaaagtaggacatacaaaatgaaaggcaaaaaggcccaaggcaaaacatagatgaatagaaacaggttaaattaagttaaaagagcttgtgggacaagccaaagctgaggctgagcattcataattaataataagtctccgtgtctttatttgggaccttgttggtgatccaaagaaaatcccaactataagggtgttagtaggtgcacctttaaatacagctgttgaggaatgccaacagggaaaagttgagcaaatgtgagggctgagctctagaagcctggctatgccataagcatgtgtagtgagctgcaagggggccaaatacctgaagcagcgggaacagaaagagagcaatgaaagatgaggacagagaagagtgcaaggtaaacccataaggcctcagagatcaccctgaagccccgggcttccatcagaagctgagaagccgtctatggttctgagttgaggaatgacatgaggtaacatagatatactgacaggcgtgcatactaactattgtgcagcaggcaggctgagagcagtcaaaggcaagagcaggggacttgctggaggctactgctgtgactcactacaaagaggataatagctgagacagagacgtgtcaagaaataaaatggtgagaagtagtcggatttggaatatatgctgcagacagctggtaaaatgtcctgacaaataggaaaagaatttgagagaggagtgacatctatccctccaagcttgaagtctaaggaaagcataaagcacccaccagcagacatggggatggagtgggtggtacggagctgggtgagggaaccaggagtttggtaacagatgttatcagtctgatgcatacatgaagagctgtcccagaggcatgagacacacactctgcatcatacccacaaattcctcttgtggctgagtctttatgattagagctctagcagggaggtgaacaagcctaacagagaaacagaattctggctggccctagagctcaaggtcaagcaggggaagaggaaagaagtccacagccaaaggcagcgggaacatccaaagcagggcttttagaaacaaaaacaccgccacattctgactacagcagacaagatacgtggaaagaacacaaggaagggaaaccacctggccatttcacaagaaacctcctctcacagctcagttctctagttagaatttggctcatggggctattttccttggaaatcatggttattttacaaagaaaaatgaatttgaattttctagcagtcgagaatgagtagctaactataaacgaagcagctcaagtcaaccctagctcctggtgacctctgccttccaactttgtttctcagtgtgcaagtactgtcttgggagtgctgctttcccctacctacacacaggctttctggaaatcaatgggtacctgcatattaagcaccatgagctactcaaataaagggacagtgaaactgaatctgtaagattctgaagtctagacacatcagttctattttcttataaaccccactgaaattggggtgctaacacagacctgtaatcccagcattcttgagacaggatgatgatgagtcacaggctagcctggacttgatagaaaggccctgtcttcaaatttttagaaatgtcaggggcatgattctgtggcgctatgcttgtctggtgtccacaggccctgggctcgatccccagcactgaaaaagacagataactgaagcaaaagttattttgtactagcctgtggatacaaaatgagatggcatgggacactcttttgaagtacaattatgaaatgacctcttgagataaaaaatgcaatattaatcaagtcaaaaatcattaaaagtcactaaaaataagctaaaagctgttgctctacaggaagctcctccctggggttaaatatgctgacctgtgagccatagttaggccaaacccctgtcgtacaagctggaagcacgacaaaaccctgagagaaaacacagacctttgtccaagagctgtagaatcaggcgcattgtaagggccatccatgaaaagagccctgttgaaggcgttttctcccttattttccacgtgctgtccaactccattcaagtgacgacaattagcattgaagtgaataggccactgtatagatactgttcgtgattcacagagatgggaatggacgtcagtattcaagcaaccttgcattttaattaattcctgcatcagagcatgccaaggaccagaagaacacacagctctgtcaaagcaagggtgcgctggcattactgtgcatggagggggggggcctttttcacacctacactttttctctcaggaaacaaaagcacatgatagtcagaaaagtatcaggcacatagaaagcagaagccagccagcagctggacagaatgctgaggttggcctgagtctgggtagatgagaatgagttcatttcaacagcattttacgttgtggtccaactatggacacctgagacaagagtccacacatccccaaggtcagggagtccagatctctcatctactaattctggatttccatttctgtgtttactgcccactgacactaatctcctactggtctccccatgtctatcccagttcactctagtccttgtagcccatgactaaaattcacacctgaaaattctgcctatgctaccgtctagccccattcccttctaaatccttcagtggctcccaacagcccagaatgcaaaggtgtccttgtctctccgtgaatgagacagccccttcagggcctcagtcacgatgctctttttcttcagagcagacatttgtgggatgttggttacccggcctctttcctttttctttgttagcacctggatcttccctctgggaaatcctccactgagtataacttcgaaaggaagtagaattccataacccttacagaagccatgggatttttctcagccctatccctgccccagcagagccaagagctggtacacggctagcatgcttaagcaaggtcctctcttaaacagttaattaaattatcaaagtccatttatatcattcacaggcaaaaacaatggctaagtcactctgcaacttacaacttcaataagcaagccagccattccacttatggggaccaattccatataccccagacaccacatatacactgctacccctgtgacatcttcctggaaaatagaggcaagacaggagggcctgaagagatgagcctgagtcagaaatgccagtcctagctcagaggctgggtatgagtagtggggcagcccagaagagactggacaggatgttgagtccagacagacagatataagtcagccatactaaagggaagggcagaggtggaccaggagggcagaaatatcccatcatatacactgagggagagagcatgactgtgggtaggatttaagctccctcccatgtagctgtgtacaaaatataagatgaagagataaggagctagagatgaaagcaaggtccactcagggggcaccttgcacagtgaagacacctgaagttacagagaagccctgaagaaatttaacatctgagtcctcacatcatgaggcatctcaatctgattcccataattaactttgtgaaattcctatatccagtcttaactcattcttaatagttacataccttcataaaataagacaaaattcatgtttcagtaaacccggtccaaaagagcttaatctgtagacatggcacccccaaaatctattccagagcagggagtagaaaaggctggagtttatctaagtgaagagttctaaaaacaacaagctcaaggaaatcataaccctgaaatgaaggctcccaggtcttatctccaataaggtatgtatctgtggacaagttaaactcattaagccttagtttccttctctataaaagtgaaggatggcaatagctacaaacctgggtgcacagtgaatcaaaagtatggcaagcctctggggtgtgctgcctggatgttgacactactctatccccagctcctctaggctggaagacatgcccttacaccctgaggcatcacctcaggcctgatgacttgagaactcagtttcccacctgtaaagtggggccacaggaggtgcagtgtggcctgatctaagctttaatggattctagatgcatacaaacattattaccaagtgcttatgtacttatgaatggccttctcagagacagacttccaacaccacctttgaatttccagtccaaccactttcctcctgtccttcataaacccacaaagactctttattgcttactatgcctctaaaatccaattgccttccacttttttattgtggccccactctgcccagcaatgtgatgctgtttcctcctgtacccaaatgtacagcacctgctgcccatctcattctcatagtccattcctcccttttctctccctccctccttccctctctccactgtctctccctgtcctgtctctgtctgtctctgtctctctctccacaagcagatccacttcctctcctgcagggagaccctccctccaatggccccaggcataatcattctctctgaatggaggactccagagttctcagccaaacttccaggtgagatatctgacttggctggctaacatctctacttccttccttctactgttatctcaagtaggtaataagctgccaaagggagaagattgtatcaggcatttatagccctgcccccctgtcagttgagaatagttcagacaacacagaagagcactggggacctcacacctctctgcagcctcaaaactttatcctcaactcacctccaaaaccttcaacaagcacttaatgccaatgggagcctcgatgatgagagcaagtcctcaggtctatagtccagagagacaaaacagctgctgcagcaagagtaagaggagctccaggtggttatggcattaaatgtggactcagatttcaatctccaatcacagttagagaatgaagttgcctttcccctggtaggaactgaaccacaaactcagatacagatgcacgtcacagattataaaacaagaaaaaatgttaggaaaaggttagaagtccctcagtgagcatagtaatagataaagttatgaaatcactgaaaaccatcagttttgaaaagatgtttaagggcataaagccccactggctacaagtttgctatgcataggttctatatgttcatatcttataaagcaacaacaataagggtagcttgggagagaacttttaacatcccccatcatctctgccagccccctcccccaaaatgcaatctaaacaacagcacaatctgcagagccttatggtgacaccagagctccttcccgtacaactgctttccctcattcatgctcttcgagacctggaatcgcctctaaaagtgtggtaaccatttactctgcacagtaatctacagcatgtcagtattccccttttaatgacagaactgtgagtcctaagctaccaaatgaaccggggtccggctcagaatttaatccagcctatcacttcagagctcacgactaggctatgccaccaagagcaggtttcatgccccaacaaactgttaaatcagactattaaaagctctgtgtatgtcaacagatcagtgctgaatgaacccttatgaaatttgacccaattcattttcacttgcctacacatctcagtttggccttcaaagctacttggtcctttctaaacagttgaatttctgccattggttctgcagatcactaatttccatcaccacgcctttccacagacaagttttccatggggtacatgcataggaatatcacaccaccagaacacagctctcctaatgcttctgcaagtgaactgtctgcagttctaaagcaatcctgcacgctttgggagagttgactacaagacccatttagctcacaacctcagtcagggtctctcccacccacaatggttagccacattcctcaggagaacgaggggttccatgttgggattcaagaaagtgcctctccagcagcctgctgggagctttacacacatacttctctccatgcccacagccatgggaccaggatactcaaatcaaagtgagtaatgggacccttgtagaatagggaaccattcatcaatatctctctctctctctctctctctctctctctctctctctctctctctctcccctgccaccactgtgtcagccagctcttctgtgacccccttgagtgacaaaggaacagctctgttccaatttctccatttccctgctattactcttcaaacaagcacagactcccttctggtattttccaggttctttatctgttagcaacaagtagaaacatttaatagaaataacaagcaagggtttcttacagaaccttaaaaggtcaaactgaaatagtgtaactaaataaaattaaacttggaaccagagaaggttggatgaagcacacggctgacttcattttactcattaggaacatgtctttgggcaaataattttctattcctgagcttttgagatgtctggttttcatgtgtctgagttcaataaaataagagggttgaactacattttggctatagcttcctggtcctaaagggcatcacagtgaacactctcctaacactttaaatatatgtgagtctgagatttctggggttcttgctaccctgcagagtatagtggaacctatctgtcatcccagagggattgtgagtttgaggccacatggggttatagggagagactgactctgaacatcaaaagaggaggggagggagagagaaaaagggaggttgtctttattcccatccacatgtcccactcagtgaccctctccatttctttcccaactctgccacacacacacacacacacacacacacacacacacacacacacttacacaaaatacccttgagcaggaccacataatggctaaaagctggagatttagccccacacatagatgctaatccaatttaacaactgattatcttgtgactaagcaagcaatttaacataagcctgtttcaacacatgtaaagtggggaatcaacatcatacctattgcataaggtagttgtagggacaggtgaatagcatgcaccaagcccttagcaagaggctggcacgtgtgtgctcacaacgcccttatcatgggaatgatacaggtgatgaatgctcttgttatgttactctcctgaagtcgctacatgggctgagacacatcccaagagtcacttgtgggaaggaagagagaagcttctgtttgcagaagggactggaagggggtgagagggagaagtaaaccattgctggaagattgagtaggtggtgcagtcctggcccctcactccctcctgcctattctgtagccatcacatcacaggaaagctattatttcagctacctgaccgtgagagacacgggacagggatgagagagtggaacagtctgtggcttctgaaactgaacgtgtttggggaacagtcagccttccatctaatatgatgagaagctgtgtgcaggttgcattgcattccaggagtcatggataactttggctcatcttctggcaatactgtgtttcagatataaaatattatccactctatgacataatagatatataatatttccaggaaagcatttccccaaaaacactgaaccagaactctcaacacaagggtcccatgcaaacagtcacatcctgctctttcacagttcacaggcagctgccgggaaagcaagattcaaaatcccagggaaacatggatgttctaggcacaggtcattatacttttcaaaacatcatctgtagaagcaggggcctttccattagatcagaatatgaatgtcacctaaatgtgtggaaatgtcacctgaatgtgtgtaaacagcaagtttaacaaggagagcagaggaccaccaccccccacacacacacctagaaacatcatgactcatgacaagcatggaggaggggcctgtagcatgtgtctagaataatgaaaacaggtgagctattttgttatttgtttgaaatctccattcaattacttcattcattcaactaattataaaaaaatttaaaacatggaaaataaaagagagaggtgtctcagtccttttggtcttaagatgttcaacccaatgagaataacagcccacgtcagataactgtatgtacaaagtgtcacatgaaacgccaagcattgaattaaattaggacaggtgggagcagagactggtcagaggagagacaacagtggctccaggcttaccctgttattaattcccacctttattttagtggcagaatacttccattttagctgggttcatggtcatcccactaaagtctcactgtccagtatggtgtccacagtcacaaagactactgagcttagaatacggccagtcttacatgctaacataatactaccttagctacattgtcccaaatatgctcattgatttactttcaccttttatttttataatgtcattattggaaaatttcagactgtagggggtttgtttactctttttttgaaatgaggtctcactgtgtgtcacagctggtctcaaactcatgaattcaagtcatcttgcctcagcctgctgaagagctgagatgacatatgccccctcacctgaaaatctgagattacatacatgtctctcattatatttgtttagacggcacggagctaaagactacatcacaccgccttccgtgatgttgtctgtgaggatgatgcagtcacggctagtcagacgtgactaggaatagtgtgcccactgtctaatgcaggcaacatcctcctaactcctttccctgttcgtgctggatggatgcaaatgtctagcgctgacccaactgcaaccatcaagtaagccacatcggtgacccagggataatggaataatctgttgcctggataatcccaggagtgatccacccggttccccagaattctgtaagattagatagctaggcaagagaagattttatctaagtctctctagagaaacctaaactgtaatccagttaatgcaagggggcatgccaggaaagttccaaaaggggccaatcattttaaggacatcttaaagaacaggagctagccagagtaagagcccagagtgttgccacaaggggcaacaagaagagggatcacttgaggcagaggagacaacagagaaggaagaaagttcaaaaccatcagggactatggtgagccctcaaatggaggctacagaggtgagtcacgtgctggagagccttggagggtggaaagctaatgagtgactgcccgaggagggggcaatcagttctgccttacatggagctatccagtgtccgtgcagagtcccatctgtggctacagccgtatgaacagaaggtggcagaggtggtaatgtatacctgtaacccagtattcaggaggtggaggctgaaggattagaaatttaaggtcatccttggctacatggaaagtatgaggctagcctgagcttgagactgcctttaaaaaaaattattaaaaccttcaaaaagcaaaatcatcctggggtaggaagagggaggccaaggaggtggctcagcaggtaaaagtacttgccacacaagcatgatgactagagttccattccccctcctcattacaggaatgagacacgaatctgtaatcccaacattcctatgacaaaatgagaggcaaacacaggcaaatcagccagaagcttgctaggccatctagcctaaagtacatgatccagtagagaaacaagaaggacttctcctctctctctctctctctctctctctctctctctctctctctctctctccacacacacacacacacacttaccctctgggtaagtaaataattacagggagcaataagaacagagaacagactagactggtggggggcgggggtcccagcttagagaaagatgtccacagccaagaccagatccagagctattcaagtagacacagagaaaggactggtttcatttcggcagagtctaggctgttgttcgtgccacatcatatcataagcagctttcccctacagacacacacaccaatgcttaaaaacagcaccagaatgggatcaaggatgcagacttcaagagggcattcagggagaaacccaatgataacaggtgtcaacatctaaaccagtggctgtatgtacctgagggaaggagaagagggggtaaagacaggaaaagcataaatccacatcccaggagcccaaaattctcctgaccctctcctgtttctcagggggaaaaaaggtagagaaacaaaaacaaatatgacattggtagtaaagggctccgcactgtcaggagacttcaagtttctgctcagagtagctctttactaaccccagcattattttttagtaataacagcatcccaaattgcttaatgcatctcacctctcctatgtctgtactatgttttcagaggaattaccacacatgtcaaaatacaattccattaaagtttggttcaaaattaaaatcagtcaagatgaggttgaagttcacagaagttttgttttttgttgttgtttttgtttgtttgttttgccaggcaaaactactagaatatgctaactttacagaaattgcagattcatgtcatctgttttctttctgatcagctaactaaccccttctctttctttttacttatttattattactgtgtttatgatgcacgtgtgtgtgtgtggtcttgcacgtgccacagatgtgtgtgtgtgtgtgtgtgtgtgtgtgtgtgtgtgtgtgtgtaggcaaagggacagctctgtgggtcaggtctctcctccttgctttactcaggctccagggacccaactcaggttaccaggcttgtggggtgagagctgctgagtcatgtcaaccagcccacatacttcactgacttctcgtgaaatagcatgagaagaaatctctcctttctcaatctaaaacaactatgaataattaggaaccttcatgatctaattattatacaagtgtcttttaaaaacatgacccagtgagttccagtctccatcatttttttaattgacaataaaaagtttgactcactttgataaaaattctaccccctaggaaacctgggattaagatgttaataaggctctcagagtgttaactgtaaatggatagactattttcttacacagaggaactctacacagtggctaaaatgactttcttgtatagagaagcaagctaattgacagagggaaagcaacagaaacaactgtggttttcttttctttccttttcttctctattgtttagacaggttctcactttgtagctcaggctggcctggaactctatgtgtaccgggctggtgtccacggagattcacctgcacctgcctctccagtgctgggattcaaggcatgcaccaccatgctcagcccactgtgcctttttcattaaactgttcctgggcaaaaaaaaaaaaaaaaaaaaaaaaaaaaaaaaaaaaaaaaaaaaaaagacctactccattagggcttaaggcaaattgccaggcctcacctggctagagattctaattcatggccttggtgaccatggtttatatcttcaaagcctccttgggtggctcagagaccagctggtttgggatccacttctctaaagccagaaaatgccatctttgatcacagggcctagtacacacagtatcacagatagctgaactctgtgctgttgattcaagcatacagcacgggtgaaaagagcccagtttgcacaagtgtctgagttaggtgtgggagcccagcatctagtgggtgagaaacaaggcgacacataccagtgatatgacaccatacaataagtgtcactgtggaagctgattcacacacttactccagcaaaagggacagatggcgggtgactggctcaggctccaggtgtcctggagagcaggagctgcggggaagagggagtagaggcgagaaggaaggcaaaaaggagaatggagtgcaaatgcagacagcctgggtgtgctctgagtggctctgagatctatttggcagggtgcaggccagacagaagcacacaccgcaaagatccatgaaggcctggcaagctcaaggagcccatgacacattctaggtagacagctggcatgccctgccatgtattttagagtcatcaccctgaaagcagcagagatgggcttgcaggaacctggaaatgggggctgtaattaggaagccattatagcagcccagagaaatggtgatatctgaactatggggaacacagctaaagtcacaggaagagactggcaaaaatgataataaaaacaacttttaggtttttatgttaaatttcaatgtgaacagtagtattcaaaagtcagaagaattaaatgctcgttaggaagcaaggttaggaaacatatcacacctcttactgctttagtgctttgcattttaaatacaaaaatcccccaatggccacacagagtggcacatttaaactaattcagctttgtctatggtcactactgtcattacctatttcacagcaaatgtttgaacacacagttaaactgtgctcccgaaatcacacaagtgcatccatggtgagcctatgcaatgccaaacctccctgaattcactctgaaaacaaacacatataacgtgcagggctcaagcacgtaactgggagtgaccacgcttaaatcccacgtcaatcacaatgtgtattaagggacccactttaaaatgggctaattagaagcttccatagatatcaacatgaaatagtgactgtctgcaatggctgaggccttaaagcagaaagaatattgctttttaatagcagtaattctagaagccagagacggcattggatcctgactaaatagactagtattggcttttaaaatgtttctaaattctccacagaaaatacatatcctgttgtctgcaccctggaggtcagggaagggagcaatgcagttgtccttgggaatgacatgggaaactgaaggacccaaggggacagaatcgaggtcaaaaatgagcatgtacacagtggaacaaaggtgaacagggtaaacccatgagaggagctgaatgagaagtcttgctcaagttctaagcatttaccaggcaaacaggctcctgggatgtgtaaaagagctgggaatacaggtgcagagtggtcagaatgtgggatctacaggattacgcctaatcagaagctcttccctctaaaaattcatcttgaacttggaaaagtcataaatgaccaactggatgacgatttgcctagggggtgaaaaactttttttgaaacttgttcatttttttctaggaagaattaataaaactacgtaagtcagatcattaaacatagacggtaatttctgtccaggagggcagcattacaaagatgaagagacatctttccctttgaagacaaaccagaaaatggagcctcagtggaaatttccaggaccatttgactagagcaggtcctccgggtctcttgaacatgaggacaagttgaatcctgaccaagccttccacagaaccatgggcggaaagggaagaaaggtgcaagaaccccacagatgggtcaggagtcaagctgctgacctggagcatgtttcctaatctctccactccataggttccctcgtgtgaaacacgttgcacagtaaggtcatcgtgggaattaaagctaacataccgatatgagttaagggtgacatacaataaaagctctgccattttcttgcacgtcactgaatgcagaagtgctagattaaggttcagagttgaacaaggagaaactgccaacaaatgatcagtactatggttaagaatatcaaactccagaactcctgtccctaggatgggaccttcagccattgctgaatgcatgattaaaccacatgagctgtgtttctgcatttccattttcacagatgttcgctacccatccaacataaggtcatcatgtttcaccagaagatacagaggaaggaagggcttttatttggttgggtttttacttctttgggttttttggaggggttgttttattttgttttttttatatgttacagaagtagagccttgctagggaggaaacagaaatttatgactctagaaaaatcaaagtataattgactctaaaaatttctaacataaatagaaaaaaaaagtaaatgtaccatttctgcaactgatgtgattctaaattcaactgagatgagcaaaaacatggttttctttcccttaccttttttataggttactaactcaatagaaggcatcttttaataatcaagtttgaattaaaagagaccaatgctgagagcagtaaaccaatttgtgtgtgtgtgtgtgtgtgtgtgtgtgtgtgtgcatgaatgtttgcttgtgtgcatgcttgtatatgtctgtgtccatgtttgtgtttgcatatatttgtgtatgtgcatgtttgtgcatacatgtgtttgtagtgtgcatgtttgtgctcaaatgtgtttgcatgtgtgtgtgcatgcatgcttgtgttgcatgtgtgtacacatatgtatatggttgcttctaggtgtgagtgcaggcatacacatactgtgatgtactcttggaggtgagaggattaccttgggtgtcagccctctccttcccccttgtttgagacagtctcttgttcacatacactaggctagctggccttcaagcttccagaattctcctacctctgttcctcatctcatcacaggagcactgggattacagacgaacactaccaagtatggctttacatgggttcttggaatctgaactcagttcctcatatgtatgtggcaagcactttacccaataagccatcttcccagaccccaaaatctttaatgaaaaaggaggtaagcacaggccaactgcttaactgtatccatcccaccccctccctaaacaggacagacatgctcataccaaatgtctttgacagtaagttattttccctaacaaaatacttccgtaactaagtggccttatactgtatctaagtagtggaagaaaatacgaacaccatctttgtgaccttcaatacagaaccagacagccgtagaatacagtcactcattagctctgatccttacacaacaggcctctttcaaactctctctccctaatttgaattggctctgcagttttctcgcacgtcactgaatgcagaagtgttatattaacaaagcaactcaggatctggcatggaaccaacagcctctgttctctcacacccatatgtacagcgatagtaaatctatgccttaaaaaactgactgcagagtaagttatagcttttctttgtatatgcatatgtcatttaaactttgcacagtttccatctatatcctggcttgatcagaaaattatcatttttagctaaggagctggtggtttcctctttcataggtcaggggacaaagaatacaaaacacttatctaaaattacactaagccggccatggtggtagcacaggcctgtaatcccagaacctgagaggtagaggcaaaaggatcaagagtttaagtccagcctcagctacataataagttctcaactgtgctgtgctatatgagaccctatccctgcccctcccacaaaagaaaaaactaaagttacactcagtttgcacccctaacttcccatttaattttgagagaccaactgcattttaaacaaatgcaacacattaataggtatttgtcatactgacttctagaggagaaatctgtaactggctggctgacacagtaaatcctgagctgctcgctttatagagagaatagtttcatcttttcttcttgaactttttaaatggctgctaatatgagtgatgcaaaggagagctttgcttaaacagaatgtatgcttgtgtgatagtgcacacctacaacgctcagtaagctagagcaggaagattccaaattctaggccagtcaaggctgcagaacaagagctgtctgagacagacagaataattatcactaaacagccatttgtttggcaatagaaatatccaaaccttagtgtgaacatagaacacatttttcttttttgagacagccctggctatcctgaaactcactttgtagacctggctggcatcgaactcacagagattcacctgcctctacctcctgagtgctgggattaaaggagtgggcccccacacccggccacgttacacacctttagtaccagcactcaggagagatacctagacagatatctatgagtctgaggccagcctattactccaatggcattctgatgcaatacaataaatatactaaacagggctagattatagactttgcacatcatacatacaaattgcttgtattcattgctcctagaatcacagaaggtaacagataaggaaactgagactaaggtgtcacagctagggaggtagtcttgtggctaggtatctgcctggttcctgcatgtgaaatagagaagaatcccaggaagagaattctggaacaaagggatcatgcccaggcaagtgcagccccttctctcatctctgaatcatgccttaataatactaatacctccagcttgccattttcaagaatgctagctgtttccatgtgtgcttctcagcttaagcaagttctagtttagacagtgacatcagttacaaaagcaatatgctccagaaaggatccttcactataacattgacattaagcaaactgttgacttggctcttttttacatatattttgttatatctagataggaaaatgttcaaatgtgaaaaatatattatagaaagctagttattaaggacagcctaaagtttttactgatatgctatggtggtttgaatggcccccaaaggggatggcacgattaggaggtatggtcttgttggaggaagtgtgtcactgtggggacaggctttgggtctcttgtgctcaatcttccctcagtgtgacagtcagttgatttcctgctgcctgaaagatgtaacactctcagctccagcaccaggtctgcctgcatgccgccatgctgcctgccatgatgatgatggactgaacctctgaaactgtaagtgagccaccccaattacatgttttctttataagagttgccgtggtcatggtgtctcttcacagcaattaaaaccctaactaacacatatgcattgcaaagctacctctaattgcaaagatgtcacctcctcctcttaaaaatgtagtctttagtgttagatgggctacctaaaactcccattcctctaaatgttaagcaacagagagctcacaatccgcagcatgtaaccagacatcacaaaaagagaatgctcctgagagttgaaaaatcctgtttttttttttttcattagaagttacctgttgtatgcttgccctcacaatgtataactcactgcagatgtggcccagtggcaaagcacttgacgcacaaacccataagtacaatccttagacacacacacacacacacacacacacacacacacacaaaatactgttaaagaagagcaattaagtctatattgagtaaagaagtaaagggcatttggggactgtggcaatatgtcttactactcaagtgtaaggacctgagtgagatcacccagaaatatatacatacatacatacatacatacatacatacatacatacatgcatacatatatacatacatacataaagccaagtacagcgacatgtgcccacagtcccagctctggagaggcatagacaagaggatccctgtatcttgttggccaggcagactagccaaatcagtgagcagagattcaaaacagaataaagtagagagtaactgaagaaaacacccaacatcaaactctggtctccacagtcatgcacacatgcatgcatgcatgcatacacccctatacacaggcacacacatgtacacacaaaaaaagaaagaacaaagaaatgcaggaaatataaaccaaaaattatatactggcagggaagaaaagtatttggtaaatcaccacctttaaatcaaacacttataaagtcaatagaatttacaaactatctttattatcatgaaatttacttaattttacagatatatatgtactttttttcctggtcagcaaacatatgatattcccaccaactgcacacgttgctgaattaatgacaaaacgcatctttgcatgtgtccatgtaatttcttaacttagagaaagatggtttcttgattctttccaagtctgtgtctaaagcatgtgaaaagagggagctggtgcctcctccctgatgactaagctatcaaagaatctgaaggtgctatgcaggctgccaggagagaaaaataactaacagtcttacatatgtaaagcttacaaaccatagcaatgaccattacagcaagacatttccaagggtgcaatagtggcacttatatcttaggggtaaccaacaattacctaatttaacttccacttatcagtagggaactcacacttgggactgtaaacctagccaacaacctgtggttgataaggccatggaacctagaaaaggaccctttatggccactttcctaaaccagtgtagttctaaatatctaaaaacataaatacacaggtatgcatagctctcactgttcattacacaagcttctttttgaatcaacagagaccattacaggaatccacaacttgttaaaatacagagaacaactgaccatgagatgctcagctccaactgatacatctacaacacaatccctatcctgaggttcaagcagcatagcagaagaagaggtggaaagactgtaagatcagaatgtctgcagagagatggtgacttctatatatgacagggagctgaacccatgaaatctgaaaaatatggtgatctaaataagacctgcatggtgaaaacaccagctgatattccaatgtggatggaggaattctagcaaggctccacccctagatggagagctacaggcaattaatggctgcacattctgagagagagagagagagagagagagagagagagagagagagatagtcttctccagggtctagttccctaataggctatccagtcccaagtggtcagcctaaacataataggttgtatttgttttgttgttgttgttgttgttgttttggttttggttttggtttttcgaaacagggtttctctgtgtagctatggagtctatcctggcactcgctctggaagccaggctggcctcaaactcacaaagatctgcctgcctctgcctcccaagtgctgggattaaaggcgtgagccaccaatgcctggcaataggttgtatttgtatacatgtgtatgtacacatgtgtgtgtgcatgtgtgactgtgtatgtgtgtgttgcatgcagcaatataaattaaagaagagatcatgagtttgagagtgagtgagggggtgacttggagaaattgggggcggtagaaatgacatgaatatagtattgatatatgaaactctcaaaaaaatcaacaaaataaatgtaaaagtagaaaagggtagcttctgatttgtttcaattcaaagtatgtcaggccctttgtaaaagtaattattgcttagttacatatggatacacacacacaataatagaaaaacaaaagccctccctaatctctccacagatgactgtgggaacaatgtatcatgtaaatgcaaccttagctataatctgtctaaagccatgtttgcaaatccctttggaaaatcctacgtgctgggtccataaagatccactctccagacaaaggcatcctgactggacatgttcaaaatagctctcaaagacaaacaaacaaaagtcactgtgcaccagccacaccaaagaagggagaagaggaaccgtgaaaggctatcagactggggaaaccgaccacatatttggaattctacagaaaaagttagcaacaagaagaaaacaggcacctggcaggaaaaaatgcaaaggaaattattgagacgtgatacacttcctgtcaaaacaacacacgaggtggtgattcattccaatagcatcttctagaatttgtgcaactttaaatgtgccataaattcaaccatgtttactgtgttgtagaaggattttgtgtttttgctttaaatactaatctaatcatgtcacactgtgcccaaaaatgcatggaaagcagaatgtactccctgtatccatagccatgccccctactgccaccaagacaagatagcacagtgccaatgaccttcccttgtttacttctgacttgagctgtggcctttggtgctgttcaatctaatggagtgcttagctctagactggagagctgccccttggcaacaaaaatataataatcagctcactgttgacacaccaagagagtcaccaggatctttatcagatgcttccagaacttgtcaaaatgatagcattcttaagtatttgaggtcagaaaaatacaaaactagatgtttccatatattctcacccatccccccaccctacccgctcctgctgaaccatctcatcagccttcccaataaattcaagatgtaaaaccattataaataagcagattgtcaaaataagcttaaattagttgggtctctgttttgactttcatttgtgtgtttatgtgtgtgatgctagtgcatggacccaggcagggtcttgcgtgttcaaagcgaccactctaccactgggctacaacaatccctaaattgctatacataattctgtttgataatacccaaacttttcaccccctcaaatagttactataaccatttatttccaaccccagctttgaaagttttaaagtatgggcaatgaggaaccatgtgtgaatgtcttaaggaaaaacaagacaaacaatggtttgtgttggaatactaaaatctgagattcctccagcttcatttatgagctaaaatgaagtgctgtgattttcactacatttcttcactactgtcattctttatgtttattttaaagttttattttatttatatgtatgtatgtgtgctggtgcctgcagaggctggaaatgggtgtgagatcccttggatagagttaaaggtaggtagttgtgagggacctgatatgggtgctgggaacagaactccagttctctgcaaaagcagaaacagctcataaccattgagacatctgtccagccctacactctttcttattttcctattgtcaccaaagcgacagccacatgtttacaatacagactacatttacaacaccatgattgagaggaaaaaagcaagcaagcaatatgtggtaacttatactatcaggcatggcttccagaaaaaaaaaaaaaaactaaaggtgacttcactcaggctgctgaaagcagccagtacataccatctctgcatcactgtctaccaaatggcagacaatggctaattcagcagcactaagaaccttttattgctggtctcccagaacccagcatatgtctccctctatgtaataatcagccaaattcagtgaaggctcaaaagtcagataagccccaccatacactacacacacacacacacacacacacacacacacacacacacacacacaaaaaaaaaaaaaaaaacacacttccctggagaagaaaatctttagaaagaactctagattatttgaaagttttgaagtcctactccaagcccagcgattcaaatcccaaacagaacaatgccaggttcctgccccagtgtctaaagcagccatgatgcagaatatcttgagcttgagatatcctagaaggtaaacagatgtcatgcttttaaacacggctccttatgaatataatttggcatagatcatattaatcatcaggaaccacatgataaactgggttttagaaattcattatgccaggcatggtggcacacacctttaatctcagcactcgggagacagaggcaagaagatctctatgagttcaaggccagcctggtctatatagtgagcagccaagaatacacagtaagaacctgaataaaaagaaaggtcacatatttttagaggaaaattgggatggaggtggtaaagagaaagaagaaagaaggaagagagtgaactgttatgaatgttcttactttagttgaaaactgctatttatcaaaaatgccatacatttcagggcatgttttcaaccaaggggagcagggtacattaagtcccactgctaaaatgaaattaatatctatctctggtcatcttcgaattcaattaaaataattcctagattattactggctcattctgcctggctgttcaggaagggctctgacgacaacaacaacgtcatgagctgctgtgacagggtcacccccaagtccttctcccctgtgaagatacaacactagactaccatcttcaaacccaccttcctgaacatctgcatgtagccagccaagggtcttggcacctcgggaatcagggcccacgctagatggtaacccatgaggcttaaggcaccatcctccctccacaaaacttcaaaaatggagccaggcctggtggcatggacttatgatcccagctgctctagagcctgagacaagaagattgcaagttcaaggcctgctcggctgcaaagtgagcttgaggtcagtctaggcagctaagtgagtccctgactcaagataaaaacaaagtaaaaggggggactagaaatgtagccagggtggaatgcgcctagcacaatgccttaaattcaactgccattgtctatccttcaactactggtggtagttgggagggggcagtaggacctgagagatagaatgcacagtgggatgggacggccccaaacccttggatttcaatgacatcatagggggcccatcgagaattcaatccaaatttcagttctagtccagcctgtggtatgctcagcctagaaaccttcctcctgtagataattcagttgccagcagtcaaacccaactcacaataacaggactgttttaaaattcatttagtccagatagcttaccgacttcctatttctcctgcttcatatacacttctgtagaatgatagctaataaaaataaagactcctgccaggaatgcagaaggaaaaagaaaacctggatcttcaggtcaaagagattgttcagtgcgtaaaagcactcactgacaagcctgatgacctgagttcaaaacccaggatccacatagtggaaggacagactaactcctgcaagctgtcgtcttggcctccacatgtacaacatggtgctcacctgtacacacacacacacacacacacacacacacacacacacacacacacacacatacattcatgcatacatataaacaaacacaaatatacatacatatcccaccctattattctcttactgttgttagttttttgagacagggtttctctgtgtagccttggctgtcttgaaactagctctgtagaccagactaccctcaaactcacaaaaatccacctgcctcagcctcctgagtgctgggattaaaggggtgcatcaccaccacctagctccaaaatagcattctttttaagttttaaaactctcctctaggggctgaagagagatctcttgtacaggacctggttctattctcagcacctgcactccagctcacagcagcctaactccagctccagcaagtccaatgccctcttctggcctcctcaggcaccaagcacacacatggtgcacatacatacatgcaggcaaaacactcatacacatctaataattaacaagaacaaaaccctgctctaataaagcaatctccaaagagcacttagtattctaccaagtcaaggcctccttaagctggtcatgggaagctgagttttctctagctcagcccatgtctgttaatctagaaatttctgaagatcaggcatattcagggtagtatagccatgataatccagtgtttcggaatgttcaatgctattgtaaagcaaccaccggtccagcatcgtcaaaccattataagattttaacacatttagataagaaggctaaaaaggaaaggatgtgaaggctttctttgtctcataatgaacaaattcttgtccaaattctaatctttgaaataaacatcaaaaaatgccttcacactgttgcctttccaatgagcaaacttggaatttactggtggtcccacaagctttgaatttattggtatgacaagaaacacactgctgagagaaatacttctactttcagtgggtaggagcacttgctataagcaagaagacctgagttcaaatcttccatatccatatagagcaccaataaaccccagtgctgtggaggatggaaacagggggatcactggggcttgctacttgccaccccagactcagcttcagtgaaaggctctgtctagcagagaatggacagggcacctagcatcttcctctggcctctgcatgtgtgcagggattgatacatatccacacacaaaaaaaaaaaactaaataaataaaaatctaattttggggctaaagctcagtaatagaacacttactctgtgtgcagaaggccctgggttcgatccacagcaaacacacacacatacacacacacatacacacacacacacacacacacacacacacccacacacacacacacacacacacacacacacacacacagaggaaacctgttcagcccctggggactgtgataactgatacaaaagaaacttccaaacctccatccctgagaactttggaccagctctgaaaattttggcagctctgaaaagcagcatttgagagctaagttgagttgcacatgagagtgactttctgaagtgcaaggcaccagtctgcactctgccaccggcataaatctgaaccttagttttcaccaactcacaccatctgaattcacctccaccaaactttactcacaattaaatcacacctaaaacattctcccagggtgcaagcagaaaggtcaggagttcaaggtcatctttagcttcatctactgagatcaaggacaatttgggctactggagatcttgtctcaaaaggaactaataaggaatcacaattcataaaaaatgaccacagaccatccattgcaaaggagattgatgctaaggaagcctgagagggtattacactcaatgagctcactagagccaggcctcctgaccccaagcttactgttcacaccaataaagagttgggacagtgacaatggccttcaattgctgcactcaggaggcagaggcagatggatctctgtgagttcaaggccagtctggtctacacagaggactccaggacagccagagataaataaagagaccttgtttaaaacaaacaaataaaaacaaaaacaaaggatgactttatttttcctgctcctaacccactttcaagaacaaaaatgagggagccatgttcccaagagttgggtcgagcagatggaagcccaaataacgctgaatttttccaacaaaatttcatcttaacttagtttataagcgagggtgtcaaaggcagagagcttcatgcagatgacagagtatagaagaatgccaaagatgggagaagaattctgtccacttggagttcagaaagaggtggtcagaaaggagagaaaggggtgggactataactcactgccatgcagaacacttgcctagcatatgtgagaccctaggagttggaaaacttgtaactataatctatgggaaccgtggagaatagcagcagagtcagaccaagaggtaagcattgtcattaccatctccaaaggcagaacctatagatcctaggcagaaggcattccaagttgctcctcaataaggttctggagatcatgtaggaggatgctatgcaagagcttcaaagagaaaggcttgaggccaatggggctctcaacagtaagttacttgagaatgggcccatattcctagatggaggcaaaatagatacagtgtacatccttgtgacaagaaggaagattaacagtgaggtgctgacacaaacggtggtcattagatccctctacctgatgctgcttactatctatctgaagaagtctgtggagacacccatttcactccacctagaccttagcctaaatagcaggggtttgtatcctacagaatgcagtggagggtgtaataaatgtatcaatgcgttaaccaatttgcaatgggtggaacagccataggcaaggaaataaatctaagagagataaatattgctcagaggactaaaaaaggaaactgcaagtctatgaacgaggtgtggctcagccgccacacacattaaaaggaggtttgtaattacaagatggttgtaaacttcaaaaagcaactgcaccactcacaagcaccgcagctgtaatgccattgtttccagagttgtgtgtgaaagaagcccttatcacaggcagatccaggtggaggctaaccgtttgggtgacttgaacggcctggccctatgactgaactgcagctgattgtccccatgagctggggagctgagggagcagtggtcctgctgcgctccatcagatgcaagaactgcattctgagaaggaggtagcagattggaatagtcagcacagcaagagaattcaaaaccacatatgttatcaattttttaaaatgtcattacaagagcaattgttcagactggcctgcatgctgcagaattgtggtaaagctggctgaaagaaacaccaatggagcatcattcggcttcccacagactagactatctttactgcctagcagtcctttatcactgtatcgggacagctgcttagccatttgggagtatgctatgtgggtgatgtgtgcactgccagagaccagacagaagtttccaggtgtctgtcaatccacagattcagattccatcaagaatttcacttgtttctcctggcagaaagaaactacttctttagagaagttcacagagtggccctgatacatcaggaaggccagccacctacttgcttcctgggaacccttgaccttgcatcccttcatcccggtggtttccaatgcaatccatacacaatacacaggagcacaccactgctaatctttatagagatgctgggtactagaaggactttggataattattagcaaaataattaatcaaataacacatgtgcactgcactttaagtccctgcaaagtagcctaaatcgggatccctgccaccactggtcgtatagacaggctgaaacactgacactcacacagaaacacacagtaggcccagtgcctggtgttgtgggaattcatttccacaacagcctggtggcaagtgatcaatgagaagggccagcaatagagagacaagggctcaggtacaaaggcggctctcaggctactaagttaatcaaaggcttccaaaaagactgtgcttgagctgggcatcaaggattataataggtggtatctcagtagaagaggcctcccatgaataaagtcaagctagaaattgaatcaactctcagtatcaaagggctgctggttccctaaccttcacagatcctaaaatcccaagatgttcaaggctcctatataccagtgtagtatttgaatggaatctgtgcacttcttgcattctagataatttctaataaccaatgcaatgataatgctatgtgcatacttgtgatccaggtttatacaggtgttaacagccaggaaataatctgtacattttagacacaggattaactttcaacccacagctcactgaacccaaggaagcccaactgtgaatacagctggccaactgtatacagtagtcattaggcatggctgatggatgcaaagtgttcacaaaaagagacaacaagaggatgactgacatgtcagcagcatggaaggaacaccaagggaaatgataggagctgctccttctgtagacactgtaggataaaggatgccagaaacagctagaaaagtggcttatgttggagtgacctctttttcaaatgatgtcagatctacctggaatggtcccagtgaatagtatacccgggtttggaatcctgcaggaggggctcagaataaatcgcccactgtttcaccaatcagagggaaccctggacattctgagaccctagtatttggataaacagcaaaccatgcagttggtggagcaagaaaagggggaacagtagacaaagaaccaggtggcaatgcacaggcaataagtcagagggcttacggcgaaggcagacaactgtaaccaaggctcattttcctggaccacaaagcccagcaaaaatgtcttagaagtcctcaatgagacttcttttgccccagaatttatctgcagcatgaaatcaaagaaataatcagcttgattaccattccttttcagtgccacactatttcacaaggagaccaggtagccagctgacccacgcacgtgggatccagacttccttgtcagcaatctcttgggactaagtccagaaagataacctaagtctttcggtgtgctgactgtaaaggctatgtccactgctgcagccaaagtgctcacctggagaccacacatgcccagtcttgtggattgcagccagaaaagttgaatagactgagactctggttacctgtaaacctcaacactgcacagaatgtcccaactgagagggccatgaatctcatcctttctggatgaagaaagaccagaaatgactcgtacttgcccaaggtcacaacacagatgagcagttatgaagaggtctatgtctgccttagactcccagccaagggcagtttgccctggatcatactgacatttcaccacctttgctgctggaaagaaagcccactaaagccaggcatgcaggcagctgctggggaacaaagccaggcctcacatgctgagctttgtgttgtatctaccactgagctccactctaaccagtaccactctttataaatgcttcatttctatctgttgtcaacataattaccaccactgtgtcactccataacttatctcatcttcaaccaatgatgccagttactgttatcctggtttcactttttttttttttaaccgggtactggtatttaacccagggtcttatgcatgctgggcaaggtattctattgccatggattatgtcctgcccttgtcttttccattttaacaaatggaaaacctgaggtagagagaggtcacatagccagaacaaaagtaggtctttctaactcactgtagcttcacagtccacacttgaaaacacctcattagactttatgacatacaaattcattaaattataaaatgaggaaaagagagtaagcataaacaccaggggaacaattaccaatgatgtacaataaatttaaaagctaactgtttttaaagtatattccatgggctgactagatggctaggtgggctaaagtgcttattcccaaacctcatgagctcaattcagttctaagaactcatctggtagaaggaaagaattgatcactataagctgcccgctggcctccacatgtgtgcacacacaaaaataataataactatatttttttaaatctcttgatcatgtatttgagtttaaaatttttattacatgtatttgtttgtgtgtgcttctatcccttggctcaggtgttgaggtcagaggacaactttcacccatatggatttggttctctcttttcacccatatggattctgaggatcaaactcaagttgtctggctcagcagcaagagcctttgccctctgagccagcttgccagccctcaattacctatctgttaaggaaatgtctggatacgtgtttgatgggcagtagaaagcatgctagcatttctagaatacagctttcccatgctcagtggtcacaaaaagcttgtcccttgccagagataggatgtgactcacctggtggcttggaagggtcttttctgggtaagcttcagttactacctgctttggtgcctctcccacaacacacacacacacacacacacacacacacacacacacaaacacacatacacccctctgctcttcaagaaacatcatttttatgttaactctactaaaaccaaacctcaaattattactaagtggactgaaaccagagactgaacctctaaagattaataaaatgtattttgattagcatattcaaaaccagcatcactagaataaataacaaacattcaattatctatttttcacttgtcctcttattaaagaaatgatgtcaaatctcattaccttgcttactcaggagaagaaatccaggagcaataacatctcaaataagcaaattacaactgtatctaagatcaaatttcgggaggaaaatgggagtgcattaagaagatgtactgccacacagactcatttccctagccagatgtcttgatggtggagcaagcaaaaagccatcctgcaaataggatgaatcctaaaacacaagagccataggagtgtgactctgtgcctgaattcaaccacccagggaatgaaggcaaagagcagtaacaggcacacgtcgatccctcaaatttgctgagagaatgaaaactgaagaaagttttcacagaacatgagggaactggtagaaattttcagaacatccaagcaacaatgttttgagttttgacaacatctttcaatgccattataacaacagtggaaccagctaccaaggactggatgaaatgacagactataatctgctccaggaaaaaacaacaaacaaacaaaaaacacctctcctatgcatgcctgatctgcacgtggtaagcaagaaaaacatctctaagctcagctttgcctaagcaagaggttcagacccaaacctacgggtggtataatgtttccagtacaactctaacatggcaaaatttcctgagtttctgcacttcaaatagaccactgtttttgttttagcaccctctgtagaagttgtccagaatgacccaactcttcataacagatctcacctaaggtcacaggggaacaacctctgagctactctgtcccactgaaagtaagacaagtagcatttcaatgaaaccaaatctacacaccccagagctgtcctatctcccaggacattaaagcaaaataaaattacagccagttcagattttgagaataatttgggctatttagcaccctcctaaccatttactgtcagaaaaggggtttccaacatttacaatacgaatttttcttcttgggaatcaagacttgatctcaaactcagagagaactcagttggagcctaaggaccaattttatacaaaaacacttaatcttaaagtaatagtatatcccgccacttaatacccacttaggttttgtttttgttttgtttttttctcacatggcatactaaaggaaaggaagccacaagtatcaaagcacatctgaaatgcctttccaggagaagtcttagccacaagaatagtttcttctgagaacacaataagaaaatacttcagaattttccaaagtacccccatggttaaaaaaaaaaaaaatgcagtgaaaccctagcagggtaatgagatttcacagaccctccattacgcactgatttcctctgtacctttaaacatttcttaactgcttagagggcagacagtacttcagagggaagtcccgtaacacacctgttagagaacctgttcaccgctggcctggctgtacagccttgataagagagaaaacagtcacgtgcatggcaaacactgattgtctgctctccagtctcatgtcgaattagacacaacattcccagaagtcccatacccaagaactagttgtgcctcagtgtccctaaccactaagtatcaggtgtggtactatacaagttctatagtcaaaataattacacataatcacctataaagtccacatcggaatattactttgagatgctgtcagagtacaacttccaaaggcttatgcaatattctcttccttcaaacagtccaatagacttagctcaactattcatcgagataagacaaacacctatttggtttaacagcattgacataaaagttcaagagagaggtactgaaaccttcccaggcaaggttatcagagcttggattatcgtgtccaaagtagatcccatagaacctaactagggtaagcctttgatttcgtttactgagacagcttcagggctgaggaacagaagaggacaaaacacagaaaagcagtggatccattctttataactatttcttgactacttggtacagaaccagtggtcaatctccacaatttggcgtgtgtagagactggaactccagcaggggtcgggagccagaagctggcaaacacagatgttgcccttccaccaggcccacccagatgtaaccaatagacagggcgctgtggactcctaaagaagtctcccttagaaacctgactggtgtctgggaaaccagagcgggtttcctgggtggtctgaacacccagtgtccacagggctcacaacaagggagaatgccttctccgcccgtgacccctaccacccacactccagtattccagcgaaacccttaaaacaagtgcatggattcccacggaatctaaaggcccctcccaaacaagataatcatagatgcttttgtaaactcagcaaacgttttcacaagaaataaatgtcctgagcttgagactgaccagcagtctggggtcccccaagcgcctgaacctcggccagaagcacagatgggaagagggggaccctggctctcatgcgctcccttctccacctcccgcatgccactgacttccaccgctcgcgaagagctgaggttgaactccctcaccctccgcaccggtgcctgagacggtgaggggcagctgctgcctcctccccggtgagctcgcaactgccgcctcagaccccgcaccgccatgcatgcacttgttgccatcccccagagaccaggaggcggcgcccatccctccggctgcccagccggcagggtgcaacctctcgccgcctctgcagacccctgcgtcctcggagaccctggagaaactttgtcccctgcgaactcagtgggcaaacttcacccggggctgcggaggacaccagagggatggctcccgcggtcagcctttacctggagctgtggcccgggagcgcccggnnnnnnnnnnnnnnnnnnnnnnnnnnnnnnnnnnnnnnnnnnnnnnnnnnnnnnnnnnnnnnnnnnnnnnnnnnnnnnnnnnnnnnnnnnnnnnnnnnnnnnnnnnnnnnnnnnnnnnnnnnnnnnnnnnnnnnnnnnnnnnnnnnnnnnnnnnnnnnnnnnnnnnnnnnnnnnnnnnnnnnnnnnnnnnnnnnnnnnnnnnnnnnnnnnnnnnnnnnnnnnnnnnnnnnnnnnnnnnnnnnnnnnncccgggcggcggcgcccgctcgccccgggggcctccacgccctagtggcgccggaggaaggagctggcctgtcagctcctaaggggagcagtgccaggccctatggaggctcaggttgtccccagcccaaagccaccacacccgggacataatagcaccggggtctgttacaataggaagtactattttaaaagaaactaccctcttaattcatggggatgatgaatgttactctggtccacagcctcgattgcctaggcttttatgcacacaggtgcctaaatgacattataaataaataaataaaattcagggttttgttttttttttttttttttttttttttttttgagaaaggcatagccacttacacaatgctcagcaatgtgaagggaccccctgatcttgctgcacctaattactgagcactgactcaaccccaaggtaaaaattccctccattgtacagctcaccataaaataggtttaagacggtcattacagctttaaagataaaattatgcatctgcttttctgaaattaccttgaatattggctttgtttttctcaagaagatgtctacatcaacatgagaggtgtggtggccccaagaacttgggccaccaattctccaaatcagaagcaggacccctctctaatcatcgccaccaaatgccctggaccaccctcctaatgttccttgtttcaacagagcccagggaatgatgggataccaagaaaagatgcccaggtcctgtcccagcgcaaacgctgctcttctttccccatcaaggacctgacattggccttgcactattgaaactcgcactcacatcaactgatctcacaccgcagagccataggccccaaagagaaccctctccactgaagaacttcaaggtcctgaagataaaaaataaaagcaataatattattttcaaacatcaatattttcaatttgaaaatgtcaactggagattagctgagtcaacacaccggacaaaaacagttttcaagctggttaggagaaaagtgagtaaaagaagccttcattgttgacccctttgttgctgttgtcctcttatttctttgtttttttttctttttcgttgattctgtcatattgccagaaaaaaaagcaaggaattgtgggaagaggaacaagtattgtaagacgttatgccaaccatcttccacactaaaaagaagcagacaggaaaactgtcactaaaactctcagcaggattgtagatgaggacatgtaatcccactagctgcagttgccttgccctccctcaagcactgggcttgatcaatatttaaataagtacttggctttcaactgttctgggttcaaactctaagcgcatgctctggcaacttgaaaagaagcaggtgactgcctgaggcaggaagatatccctgtgtaaataactctttgcatctgattgatttcgctcctgcagacacaggtcactcaggacatggatagcactgagctgggctggaactgcaggtgtttagaattcagacaaagcctgctattctcaggccacagacaaggagtgctcagccagaaagaaagcaggtgggcaattctgctggcattgccccagcttcccagggagtcctctgcagtatcccagctggtctgtcttgtctaacagtccagcctccattcatccttaacctttatgctacccagacctcctccgtaagtcccttctccattgtcctgctttcttccatcctctgacctttgacaaagagtcgtagtcttatcacacggaagagcacttgcctatacttgctgtcatgggcaggactattaaaattctctgatgactagcttgtgtcaagttgacataaacctagacagcacagaagccaatcctaactttctttctaatgctgtggcgaataccataaccaaaagcaagtaggggaggaaaccatttatttggtttcctgatcacagtccataaagttaaggcagtaccctgggggtgggaactgaagtagaggtcacagagggatgctgcttactggcttgctttttcatataacccaagacacttgcccagatatagtagggcacagtagactggaccctcccaaatcagttattaaaaattgaaaacaattctcccatattctctacaggccaatttgatgtaagcattttctcagttgaggttcccttttcccaggtggctctagtgtgtgtccagttgggggaagaaaacaaactaacagcacagagcccaacatactcaaaaccaggggaaagtctcaagtggaacactgtccatgcacaaaataatgtttaccttcagcaaatccctaggggcctgaaactctaacattaatgatttgttccgcctctattgccactattttttaaaataatgttttcaaatgaactttttaatgtaagtataccaagtaatgggtttcattgtatatggaagggactgtttatattcaacacagttctctcttctggctacatattatcaccccagggccccacactagaccataatctccaggggataggacccaggtttgtaacttccccaggggattccaaagtctagaccaagttgcaatcagatgaaagggactgagtttgtcaccagtgcaggagatgaacatcaacctttaatgacacaagggtaagtgacatagccctcctttctgtttctcctgtgttggacaatctgctcagaacttgaggtgtgctctgcttcagggaagtgtgcacatgaatcatgttgggattgtagaaaggcaaatccttgtttaatatgagctgaaggctgcaatgctgcatttctgatgaacttcagaaagtgcccacctgcctggtctccagaccaacctccaggtgtggtagttcatgcctataatccagcaattgggaggttgaagcaagaggatcaccatgagttcaaggcagcctgagctatgtagtaagttccaggccaacctagactatatttagagagagcctgtctttcaaaaagtcatgatagagcaagatgacagtgggcacacttttaatcctagcactcaggaggcagaggcaagtggatctctgtgagttcaaggccatcctggtctagaaatgagttccaggacaaccaaggctacacatagataccctttctcggaaaaaaaaaaaaatccatgctaaacacctgtaacccccacacttgaaaggcagaagcaccagtctaggttggattagccacctgccttctatacccagaattgttctgggatatatttgaatagaagctgtccacaaaagaagagttctcaatggctgttatgaaaggaaaagcttattccattgttctatgtgggatgtgtgtgcagctcatcgcaggtgagggtcctagccttcaaggtacattgctaggcaaggatatgtgtacatgcaggagagagtgtaggcttccaagtgcattatagaagagggatgtgtgaaccaaaagttcaagaccacccagtctacacagcacaattctgtctcaaaatacaacaatgcaaaaacaaataagaacagaagttcaaaatagacataagggacaagcagagaaaaagtcaatatttgctaccaaagaagtcactacctcagaatatttttagtcaaataatagtaactgctaactacccacaaaatgcatatgttacaatctttgtataaaagagatcatattttgccagttttaaatataaaatctttctgacagggaaaacttctattaggcaaaacctgttttaaacaaagttacttttcaaggcctacaaaaatgttttaatttttcttgaacttggaagtaaaacatgaacttttaggtcaagaaaaaaaatgtcttaccatataatattatctttatttgcagtaataaaatatttcttattttaatttttcaggaggaggaggcctacgaagctgaagtgcacagagcccacagaaatctcaatgcacacaagttctcaaagtccatgttcgtcccaggtagttagaaaagcctgtagaccttcctatcatggctgatatttgcatacagctgcttacatgagtggcaggaagatattagggaaattataaatacacctcttgagtagaaccaaccctataaatatacaggatttgacagttcccacacatgcaatttgtgaaacactgtccatgcacaaaatattgtttattcgtctaatccctagggtcttaaaactctaacattaaagatttgttccacctctattgctaccttttttagcttgtgactggtggtcctatctggacccagtctttccaggttctttttgtctcagttaaagaattaaaatacagatgcacacagattacagagtgagaaggaagcttcattcagaggcaaagcaatattacatctccaatattcggtcaaagagcagaggccaactgagtgaaagagcattcaggggcagaggcattgtttggggcttcattttgtgggctctaggaggaggatgggcttggatgacagggggcttgggagtgtggttctctgttttggctgacagatttgattatgtaagatttttttttcccctctgagtgttctttcccacaatgcatccacaccatactggacactctgctcttttttcaagttcccaaaaagactgcctggaagtgcctagatcaaacaggacttaaacttgaagtaatttttctgactggctcgacagtgccaggattacaaacatgtgccaccaaacctgggccttgaaacaccaatttcgattttctgtctctcaccctttgagagctctggatcattctgacttgtgaaaagctatcaaatcctaccagagatccatccaaggaaccactgaggtttgcaaagaagtctactctaaggccgggcattggtggcacacgcctttaatcccagaactcgggggaggtagaggcagacggatctctgagttcaaggccagcctggtctacagagcaagtgccaggataggctccaatgctacacagagaaaccctgtctcgaaaaaccaaaaaaaaaaaagtctactctagaacagactttatctcagaatatgattgtttgctacactgatgtgcatgcttgtgtgtgtgtgtgtgtgtgtgtgtgtgtgtgtgtgtgtgtgtgttttcttgctaaaatggctacaggtaacttcctgttatatcttacttcttaaatattaagctaatgtaagaccccctttttgatctccaggcataactccacaagacagtccaaagagatactcttaaaagcacgctgtgtctatgtatcttccatcagtcatcagatgttccagagtgctccaatgtgggtgtgtaagagagaactacatgtaccctaacacctgtccaacactgataggaacatgttaaatctcagcctgaagcaagctttcacggttatataataaaagccctttttaaagagttgataattgagacactaacaccattttaattagggtggcacaactagtcactgattatacctgtgggaaataatgggtacgaaaatgtcacatgggctgtaattatattgaaagcttctggtgactggtgacatgacagatgtgagaatgaggccctgctgctctgctcatgacgtcatctgaacactgctaaatgcatgtgtggctctgggtgctcttactcatcacagacaatccagttcctggtttcctatttacaaagggcaggcagaggaagggaccagagaggaaactccataaacaaaataaggatgaatctgtttccctcccacaagaagttatataaagtattttcactaagcttttcagacttcatttgaatacatctgaaagcttctaacatagaatctaaattgaaatcagatcctgccataaacggatctcagaacttttgtctaacccaccttaactaacctgcaatttctaaagctaatttaaaggacctagagtcagggttaaaggcaatgcaccacagctgccttgtttctgttttcaagtctggaagatctgtgcctgttcacttggtatagcttcatctctaacactcaaagaaggcaggcagggcaagtgagtttacagaggcattcacacttcaacccaaccaaaccaacttaacaattatatgtaatatgcagaaaaaactacacacttcagtaagcactcacattgtcaagagaggagagagagagttcaaatgaataacataatgatataccccaacggtttagaaaaacatgcaaaagccaatccaaatgactgcaagaaataacaaataaaaaagtattctaatcaataagtagactaatgaattaaatagacagttctcaaaagaaaaaaaccaagaaaccaataaatatttttttaaagtgtccaatatctcagacatcagggagatgcaaattagaatctctgagaggccatctttcgccaaatcagaatagtaaacatcaagaaaacaaatactagtgaggatatggaaaaataaaaccattactccttgctgttgggagtataaagcagcacagctagtatggtattcagtgtggaggttcttcaaaaaaattaaaaatagaactaccctataggccagctctatcactcttgggaatatactcgggggagtctaagtcttactagagaaatgcttgtacatccagtttatacctgcagtaggcacaatagttaagaagaagcctaggccaccaatagttgaacagataaagaaaatgtggtatatattcacagtggaattttattcagccaaaaagaagaaaaacaaaatcatgacatttgtaagaaaaatatggaaactcgaaaacattttgctaaagaaagcaagcatggcttagaagagaaaataccacatttgtgtgtgtgtgtatgtgtgtggttcctacattttgatttttatatattgggggggcatgagccatgaaactagaaaggagaccatgagaggggaaaagagacctgggggcagaaagagagaaaaagaaggcaattgaattcatgtcacaagaaagcataagggagctactggagagaggaagggggagtgtgggagggagaagagggcaagagagggaagtaggaggggaatcttgagggaacctatgggccagtagaatagtgaaaagaagataagagaaggagctagaggaggaaggacaaagtggtgcagcaggctttcttggactgccagcctccaaatcacaattattaattgtgaatgctcggccttagcttaggtatgtttctagctaacctttttctttaacttatatcaatccatttctgtcaacctatgtgctgctccaaagcttgtttacctcatctaagtactgtccatcctgcttccctgcttcctccatgtctgtctgtctgtctgtctggcccctggctaactggctcccctttgctctctgcccaccacccccacctatcccttctctgcctaactattggccattcagcttttcattagaccagtcaggtgccttaggccagcaaggtgaaacagcaacacatctttacatagttaaaacaaaaacagcataaacaaaagcaatacctctttacatagttaaacaaatattctattctacaacaaaatgggcttagaaatgccataatgaaacccattattttgtatgctaattttgaaaattaaaaagaaaagaaaactatggtatttagcttcaggatgaagctaagccatgaaaaatgaaaaccaaatactgtgtgagattaaaaaaaaattcttattagtatattgtggagatgcacaagaaaactatgtatctataaaacaaaaacaagtcactgtgaaaaaggagtcatcagaggacaagaaattaaaaataggaaatagtaaattttaaaagtttaacacagggttgatgataaagtcatagaaatgtcccagaaagttgtgttgtgactatttttaagacaaatgcacaggactgaggatggcttcccatttgtgtttctctctctctctctctctctctctctctctctctctctccacacacacacacacacagagagaaaatatgaaataatttttaataaatattaatctcacctaacatcccactaaaagaaattctaagtgaagaaagaaagggggaatgaaagaaatgattaaagaacatttttaagctcaaaattcaggaaaatgtgtatgtctttgttaaggttactattgattgctgcaatgaaaacaccatgacccaagcaactagggaagggcaaggtttctttggcttacacttcaatatcactgttcatcactaaaggaagtcaggacaggaactcgaacagttcaggaacctggaagcaggagctgatgcagaggttatggagggttgcttgctatggtttgctatggcttgctctgcctgctttcttatagagcccaggatggcaccactcacaatgggctgagccctgccacatcagtcactaagaaaatgccttacagccagatctgatgaaggcatttctcaaccaaggttccctcctttcagataactctagcttgtatcaagttgacataaaagtagccagtttacttctaatagatcctcaagacctgttaagagtgttaaggtacacagacaagactgtttgctctatacaacacttttgaaacagcaaaatttgcaaacaatgtgattgttcatatggttgtttggttaggtaaactatagaaccttcgtcatgcagttgttttaaaatactaatgtgaggctggcgtggcccagggtgagagcacttgctgctctaccagagaacccacgttttatccccagtacccctgtaagactattcacaactgctggtaactccagttccaaatgatcctccacctctagcctctatgagtacctgtactcacacacaaatacacacatatgcacataattaaaaaagaaagcaaatctttttaaaacgcacaataaatacataacaagggaatagaggcaaagatccatggtcaagcccccagtgttgcagagtgaaaaataaaacgagaacagggcagtgtttataggtgtctgtgtttgcagatgtgctgtagcgggcctagaatgtcactgagaatgtatcaacacagtgacctcagaagagaaacaggactcaggattagtgaacaacctttaacagtagacacgaatgaatgaatgaatgaataaatgaatgaatgaatggatgaatctgatgatttatcctattctattaatccactgccaacctactatagtactctttttaaaaatttttttatttatttaatttttcatttatttgtttgaaaagtatgtacatgcatgccacatgaatgtgtggatgtcagagaacaacttgttctatcatgtaggtcctgagaatcgaactcaggtcatcaggctagacagcagatgccttggcctgctgaaccatctcaccaaccctctcaacagttctctagagaagtgtgttacccttcagctctgtcctctttatctacagggtagtgcagacttctggtctttgtgtgctgatagaattggcttttcatccatgtgtcaacagccttgaagacattgctataacaacaactttcacactatgctttagttggttgcttgctattttgcagatgcagtggttgagtaaagggcagtgtgcactctgccattggacataattgacattctgcttctctgttcttttaacaaatgactgtaactcactaagttggactttcctcacccttaacatgaaaaccctcataggagacttagcatcttttagaactgtgatgaagactggagcctggcactcagccagaatgctggacaaggcggccctcattattattgctttgtccttgctggacaacagttaggtaagagcaaggtcggcttcgttgtcttcatatgattccctagtgtctatacaatattgatgcccattttagaaacctgaatgtcacctggcaatcctttagaaaagctctgaaaaactggcatgaaagccagagtatgggtcagtgaacaccagccccaccgtgatgtccatgagtcaggtgggaagctataggaatgataccactcctggggataggtggaattgcaggattctccctgtggggtattcaagggtctagggttatagacatcattgctgcttcttttctgtgttaatatgttggagcttaatatgcattattcatattagcaatggttccttcaggtgaactctggtcagagggtttgtggtaggaggtttcctgataaaactcctatgagatggtccattttagttgcaaatgtggagttgcatgcctgcctggccagtaccattatgtgtccattaagtgttgtaggcatccaactatacacagtaatgaggctctgtgtcttctgtaactgctgcaaaagttcctaggactatcacttgccttgcccaagcaacatctgaagcatggggcatagccctacctaagtatttggtgggcacctctctgtgctcctcctagcctgtcatcatttgcctctccctacatcctggcatatacccactgcagcactcaattgcaaagtgcaaaagaactcatttcttttctgatactctgcatgagcccatccacaagttcccccctccccatccagctgctacctgatgttaagcagagctatctggagagctgggatctggacagacacatcgctcagaggctgattcagcagttctggtgcactccaggaaattcctcctagggtgatctatctgctaggtgcttctccaattctgtccttgagaaacaccaatgtgaaccatcctcccttcctaatagcaacacttaccagcaccttctggagagatactgtccttgggcaccattttcagtcacctagtcctgctgagaagatgttattgaccacagccttggacacgatcctggaattccatagtcagccatggtgtatacctggcacttaaccctccaccacaccaggagatgccagtagtggcttaagtgagggaagcaccaatgactaacaaagcctagagctacacccagcctatcccttctccaaaaccctgtgtggcctcatgtggggacttttagaaaaatcgctagagtcattttcttctgaagctctaactaatacaagctcctgtgcagaccactgctaccctgatccatctggcttcaccaccaactccagctcccccacctcttctgctctgccaacacaagttctgaaaacaacattgctgagctcaatgtctttctgccaatcatgtcagcctccttccagcagaggctcctcaacctgctcatccatgcccatctggggtagatgtcactagctgcacaccccctactctgtgctttctttggcctttgggtttactggccagcatccctggaactgtctctgactcggtctacctcagcagagcaggccctaaggtgatcctggctggttgttctcttctgtaattgtccactgaataaacaatgtaggtctcaaccacccttctgaccctcacctaatagaaaaggcttatgctttgtctctggtgtctggggaaagaaggaacgtcttgtaatgggcccaatgtctcaaaaaccttcagactcatcctttgcattgcttgctacgttcctgagagacttgtattctttttcttcaactgaggagccaggatacaacggtcttccttaacacggaaaagatgtcttcccaatcagactccgaggtgagcatgtctgagaagagtgggaaggcattgtataaaacccttggctgcagaatgcctttcacctttgctgccaactgcatggcaaagtgtacagatcataagcaaacagcacgccacaagatgaaagccccaagtgggaaagcaccattgctcacgccaaaagcatatttgcttttctgttggcaatggagtgcctgccattgtttctccaggagttaaatgtgtcgtgtggtacaatgccatccaaatctgcaccccggcagcaggaaagggggacgggatgacacttgtccactgtgtgggcacgtttctctaaaatgaaggcttggcttgtgtgtgtggcagggaggactggaggctgacctcctctgtaaaggctgctacacttagcatctcatgttggaggcaacaaaaaggaagtgtctacagtaagggttcagtgaaggaaaagaagggcagtcacaaagccatgtgagagtcttaagaatgcccaaattgggcgggagagccaactcagaggtcaaaagcacttgttgctctttcagaggacccaggtgcaagtcccagcacccacattacagttcacaactgtctgtaactgcagttccaaggggtccaacactctctccgggcctcgatgggcaccaggcgcacatgtggtacacatacatacatgccgacaaaacactcatacacattaggtaaaactaaataattaaaaaaccaaataacagggagctggagagatggctcagtggttaagagcacttcctactcttccaaaggtcccaagttcaattcccagcaacaacatggtgactcacaaccatttgtaatgagatccagtgccctcttctgacctgcaggcatacatgcagacagaatactgtatgcataaataaatctttaaaaaaaaaaaaagacttcaaaaaaaaaaaaaaaaagccaggcgatggtggcacccgcctttaatcccagcactggggaagcagagacaggtgaatctgagtttgaggccagcctggtctccaaagccaggagaggttccaaagctacacagagaaaccctgtctcaaaaaaccaaaaaaacgaaacaaaacaaaacaaaaaacaaaaaaaaaaccaaataacacctatttccccctccaaatcccagagaacatctcagaagaggagacagagagctgtaagagctaaagagtgagggaaagtgccatgaacctcttgaatatcctttgggattatcctctcctctattattaattcattcagtagtcactgagggaatcttactgatgataatattctcctatgtccaagcacagttactgctactggtattgcaggaacactcggagaagcttgcattctagtgagtaagagcagatagtaagcaaataaatcaactcaataaggagacatacaggatgtcaggtgagtagggaaaaaaagggggaagtgctaagggcaggcagttgagtcacaagcttgagtgggttgggaagagaagtcctcttacaaatgaaaaagtgacggacatttgaagagaccagagcatgcatgcttctgatacccagatgtggagggagggtgtcccagagcatgaatagcaagggcaaaggccaccaggtaggagcatgccctagaaagcgtgtgggcaatgcttagcacagtgagctccctaaggtcattccctagcccaacaggaaccacagggagaacactaacttcatgctaagcaccccttgttcatatgtggtctgcactggggatctgggcaagcctcctgggaacatcaagcttaatttatgcaatattagacatctatagataaacctccttgtttctccaaatacatagaggatttagttgcttagcaacaaaacatacacctaaaatacaaatcaatagagctttgattatattaaaacttcagaggggattattttggcatcattgcctctcttataaatgttttcttagaggcagtcataaaattggcatttgagggaaggcatttccgtgtgtgtgtgtgtgtgtgtgtgtgtgtgtgtgtgtgtgtgtgtttctttactaaacattcagagctttgaaaggggagatttatcatgacatagaatttttcatttcaagtctctgacttgaaataaaaaaaggaaatttgataaatgtaggtacattaaaagcagcagtgtcgtacagcaaaataccatgaagaaaattaaaaaggaaattggaaaattagaataaaatatttaaaacagagaaaaagactagtatatgccatatgcaaaatcagttggcaaaatcattgccacatgagcatgagaacctgaattcaatgcccagaacccatgtaaaaagccaagtgtagtggcaggtgcttccacctccagtgctgccacaatggggactggcagatcccccaggctcactggtcagcctgcctggcacaaacagagagcccaggccagtgaaaaaccctgggcaacaaaacaaggtaaacagtgcctgaagaggtcagggcctctgccctgcacacacacacacacacacacacacacacacacacacacacgtgcacaaacatgtatgtgcagatgcacatatatgaccagaacatgaacacatccatcctcatacacacaaaaaaaagaacttttgagaagcaaaggacagaatgactactagaaaaatggagacaaatacacagacagttcgtataaaagatacgaaaatgtcccacatacgtatgaaaaatgtataaacaactacctttagaaaacttcagtgctagaatgtcagttctcacctatcagattgggaaaaaattaagagcatagcatctcatggtgtcggggaggcctggaggtcattctcttgactcactactgggagtgcagatggcacgatgcttcttgggaaaatcaggcagtttctcagaaactcaaacaggacccatccatgtcacttctagaaacccgccctcaagccacagcaccaaaagcacagacatatctttttaacattttatttgttgtgtgtatgtatagcattactgaaatccatctcaataaacatgctcatacgagtagctaaataaacgatgatatcgccattcactgaattaaatagatgacagtatatccgtcactgaattacttagcagcgtaagaactaaggactgtagtctagaaaatggtattattctggggctaaatgagaaaagggaattgcaaaaaaaaaaaaaaaaaaaagtttttataatatgctaacttttgtgtaagaaagaagcagatatgaaaatacacctgcatctgaaaatctatgaaataaaaaatgcagaaattaaagaagctgtctgtctccaaggatgagtagaaaggggtaaaaggatggggggtggagtagtaagaataagctgggagctttcattcttaaaatcatagtaatggtatgtgttttcccaaaagtaaacaatacttaactaaatacaaccaggatgtggagagaacctgaaatgaaatccaaacagtaacagatgagatcaatcttacaagtaaatgatagagttacagtgggggagatgcgggatgtggagtcagtccaggaactaggaaacgtcatactctctgaaagcaactagacaaatagtgacctgttgttggttgtttttactctttagtcttttgttctcttctgaggggcctgccacccagtttccaaataaataccgggtgttttagacaggcaaagtaacaaagcttcacagaggtaaacaaatgcaacctaaaggaatgcaacaaatctttgcatcattaaacaaatgttcctccgcataaacaaatgtaacacatctttaactaatattctgcaacagtaacctattctagtaaatctacttctcattggaggatgaattgataatgctgtaacttcttaaaatatgcctggtagggaccaggtgtggtagctcacacctttaatcccaacattcaggcaggcagatctctgtgagttcaaggctagcctagtcctcatagtgagctccaggacagccaacactacataatgaaacactggtacacatgtagtgtggtatgtgtgtgtgtgtgtgtgtgtgtgtgtgtgtgtgtgtgtgtacaatatttgtagtgtactctgtcccaagggcagagagagaagctgtaaatatgttatgaaatatcacttggacttggaggagtggaaggaagccacagagcttcggatacataggtgtccacatgagcagaatgaacagaaatgaacaggtgaaaacatagatatttgtgctagaatgcatttcctacttcagtccattagaagagctttagagcaatgatcctcttagaggccgtacgtattttcagggctcccatcctgaggtcaaacatcactctttaacacaaagagaattctttggttctaggactgaagtaggaaaaacgcaaattgggccaggagcatagtatgataccagcaagagaagaggggctttttttaaaaaatgaaggaaggaaggagggaaggaaggaaggaaggaaaacatgggcaacattatggtgatacagactgtaaccttcagaataaagaaaatatcttaagtccgtacttagggatgaacagaggagagacaacttctccctataaagaattccaacaatgaagaaatggaaattttcatctgaactccactacaatcattgctgttggcaagatcagaacgtgctaaaattagtgggtgaaaatatagtcatcaacatgatattcctgccaaaaacacatactcggaatctagtggagagaaaacatcagacaaacccaaactgacagacatgctacaaaataattgaccagtagtcatcaaaagtcacaagttcctgggaagccacacatttcaggggtgctaagaaaacatgacagctaaatataatgaaggatgctggactagatcctagagccgagaaaggacagggcagaatggactggaaaaaccagtatgtctgagtgaacagcattagaccaaagttgattgctggttccaggcatccggctgtggctatgaaagttgttaacctgaggacaggctgtccgaaacctctctattcttggcaatgtttgtccatcagtcaaaaatggcttcaaaataaaactacattggagttgaagactctaaagccatctgtgcttgaagctcccacttgtatctagttctccacacagcagagacgtgtctccttgtcagtgtggacagagcaagtgcctgcctctgccattgctgctagtcccaaatcagatatttgcccctcagaatccaactttcaagagcaaacatttattctggctgagtgttgcactctggacatgaggctcctgtggaccctgtcaccatgtatctatgtccactatacccctcccttttccctttctccagcttttcatgggtagatccagataacccataccctaatctcttagactaatcataaagaaatccataggtaactaccccatgttactattataaagggatattggtgatgctgaaaattaaattcatatcctttgtctatcaagtggccttcatgtcctatttgataagagaaatttgaatcaataatgtggcctatttacatgaagggacagtgttttagctatgagtacagcctactactattggggattcctgtggaagagtttagattcaccttgtgacaaaccggaaatcatctcatcaacataaattaaagggcagggagagtgggccatggggacagctcagtgggaaagtgttttctgtgcaagcatgaggacctgagttcaaatccccagcattcatataaaaagccacatgttatgattcatgcctgtaatcaaagctctgggagctggagctccacaggaggttagggggaacagttcactggacagacttctgtgagctccaggttcagtaagaaactgtctcaaaatataaggtggaaatcagtggaaggagtcaccaacattgaaattgtgtctccaagcacacactcaagatacacacatacacatatacacactcacacacacaataaagtatctttgctaggaaccctgggcagtgattcagaatgttttaacaaaacaagaaaatatcttaaagtagaacttcacgtgagcgtggtgatggaggtgtaagtcagagttcccagctaagcacttcaattgcgctctgttatgttgtaaataagtaatgccctgaagacccggacactgaaggcgtggtccccagctggcgtatccagggatcacaccacaagagctctaacatgaccagtgcagtgattgatggatggcatcataatctgatggcattattagaaggcggtagattctggatgtggggcccagttgcaggaagtagatcactgggatacatcactgaaggatatttggtccaggaggtccctacctctctttctctttctcttttgtccaccatgaagtgagtcactttgcaccaacacatgcttcctgccaaggatattctgcccctccatgaatagtcccagaagcaatggaacccagtgactgtgcgttgtgagccgtgttaaatttttctcctttaaagtctctctcatgttcttgccacagtcatgaaaagtccaactaatattctctccttgtaaaaacagtggtgatacccatttcttttaccttcttggcagctgttgtaatagcatcaaattctgtaacttccatttattagagtcttcactccatatctcagcactaagacttggttttccatatttgatagcataaagctattaaatccttagctcttttttttctttgataagtttttgtatgttttttttttagatgttctcactttgtagcccaggctgctcttgaacttgtgatcctcctgcctcagcctgctgagtttagctctatttgtatatattgacacaatggactgaagggaagatcaaaatcacttacttcacaaactactaaatgctacctttagaggaatacgacatcctagcatgggataggtggcacataaagtcagtgtgctcatttgagtcattggtgggaagcctaatggcccatttaggggaactgagtctttcctaaaaatccatatggagggggctggagagaaggctcagaggttaagagctttggtagctcttccagaggctgagttcaattcccagcacccacatggcagctcacaacttcttgtaactctaccttcagggaatctgacaccctcctacaggcatacatgcagacaataaataaacgcacaataaataaaaataaataaattattttttaaaatccatatagaaccaaaagctacagtagagagggactgaagattaagggactgtgtagactaaatacctgatgacttgggatgacttccttctactcttagccctaagacaatgttgcttagcacccaccataataccacgcagcttcagaaatgccatctcccctcctgaaactgactaaaatgactagggagaaacaatcctgctaaagaaacctgacaccacaaactaaactaatttcttcccaacagaatgaagtctggggacattgatgaaaacaaccaaaaactgactcacagaaaatgtgctttccaactcattcagccacctcagtacgattgattcagacaccaaagccaaaagaggcctcacagcaatactattactcagtcccccttctgactgtaaatgttaaaatccttggttgaattccagcaaaacaaatctgtgtaaagcattatatactgtgaccaagaggaacttatcccaggaatgcaaggacggcccaccatgaaatgcaaggacagtccaccatgaaattgaaggatgtatggtccaccatgaaaggaccaatcaactctacatcactaaaataaaggagaaaggccacactgtcatctcaactgaatgaggaaaagcacccgacagaacctaatgctctttatattcactaggagcagaaggaaacactcccaactcaggaaagactatgtatggaaaccccaaagctagagtcatagttaacaataaaaacctgaagtctctttccttcatgtcaggaacagaatgagatgtctgttcttgccctttctagttaatactgccctgggggttctggccagagcggttacatcaggaaagaaagccaaaggcatctgtattataaaggtaaaaggaaaactctctaattccaatgacatgcttttgtaaatagaaaattctaggtaatcaactaaaaaactctttgaattagcaagcaattttaacaaaactgccgtttataagcgcaatataaaagtcagttacatttccatatactagaaaacttatattcttgggataaagcccattcttgtccagattaagatcagtaagaaagggtcaatgagacaacccagacaataaagatgcttcctggctggtgacctgaattcaatccctgaaacccacatggcagaagggagctgactcctataaactgtcctctaccctccacatacacatgatgacgtgattgtgagtgcgtgtgcgcaaatacacacacacacacacacacacacacacacacacacacacaccaacttctagtaggcgattagagcaaggtttctgtgtacacacttagcccatcaaggagcagttagaatgttatatcacaaaataaaatgcttatgcacaaatgaacccaatacctataagatcaatacagagaaagctacaaaactctgatgaaagaaaccaaagaaataaatgagactgtttcctagatataggaaaattcagcaaataccatgttatgggggctggaaagattgctcaaggttatgaacatgtgctgctcaggcagaggttccaagttcagttcccagcacccacagagggcaggtcacaactgcctgtcactccaactccagaggacccaatacactcttctggactccaccagcaccaacactcacacatgcatatgcccacaaacagaaacatacacacgtacacataattaaaaagaaaagaaattcttaaaataaaatcttatgcatactgacaagtgtattccaaacttcatttgtcaaagcaaagaacccaatatggttgaaggagtaaaaaaaagccaaggaaccatcactacccaaattcaaaactcatggtaatggagcagagtagaaaacccaggaataaacccaaatagacaggatgatctgaacattagttacgaggcaaaggcaattccatggaacaaacaacaacaacaacaacaaaagctatttcagcaaatgggctgctgaaataaatagaatgtgaatgagtatttcacaatgtggacacagatttgatccctttcagaaagagtcaactaaaagatgaatcatagacacaactttaaacatcatacatagaaaacagcatgggagaaattctaggtgttgtgagcttgaccatcactgtttagatggaacattaaaaacacagcccatgaaaggagaactgatgttgggcttcattcaatttaaaaagctgtgtttgtgaatttaaaaaaaagtaaataaaaagaaaagccacaggcttggagaagatctttccaaaacccatatccaatgaaaaactggtacccaagacaaagaacccataagaatgtatccctaggtctggagaaatggctccatgctttagagcactggctgctttcccagaggacctggattcgatccccagcacccacatctataactccagttctaagggacctgatgccctctgcacacactgccttctgccttctggcctctgcacacactgcacccatgtggtacacagacacacatgcaagctaaacctccatgcatataacataataaaattaaaaattaataaaaatgaacttaaccataaaaactcacggttattattgtaggaatgcgaagtgatacaaccactctgaacagcagttgcccattttcttatagaattaaatacacatttactatctcttagttgaataagtaccaaggaagtgtgattgtaactgctaaaacttgcaattaaccagaatttccttcaataggtgaaaaattaaactgtaatgcattcatgcaatgaaatattattcagcaaatttttgaaaatgggctagtaagccatcaaaagatacatagaaaacctgattaaatacatctgttgactgaaaggaaacagcctgcaaaaggcatgtatatactgccagcaattctcagatgagggtacgtatggctcacttcctccaagtgtttggggacactgctagactaaatagctttaaggaacatttatagcttaaaacatggttgttgatttttttaatattttctggatttctgagtgttgctattattttgctttgagtatttttagtctagcttcccagataccacaaggggtgtgactttgctacaccatgatgcacccagggcaatcagacaaagcaatcatggaccaaaacttctgaaatcatgagtcattaactttgcattaatctttcttctttctatatggtttttcttgggaatctgatatagccatggaagtttaccagcacaaattctcaaaattttagtagagtatcaaaggtttaattcatgcttatatgttcatcatggatctgacgtctctccctgtcccatgccacctcccctatgaaatgagatgatttttgttttatttttatttttgagacagaatttctctgtgtgtaacagccctagcttccctggaactagttctgtaagttaggctggccttgaactcacagagatccacctgcctctgcctctgcctcctgagtgcgggattaaaggcatgcacaatcaccacccaaccctttttttttttttaagaaatttatctagcaagtggctttgctcatggcagtgatgaaaaacttgattttacactttttttttttttggtttgggtggcttgcctacatatacatctgtgcaccatgggcatgcctagtactggagggagccagaagatgagtttagatttcatggaattggagttacagatggttgtgaaccaatatgtgggttctaggaatcaaacctgggtcacctggaagagcaaaaagtggtcttaacctctgagtagtcatctctctgtctccaagaacttgctatcaagcatctgcttatatttgcatggcatcacttctgctctgattccatgaaataagtcaaatcacacctcctgacctcaaccaagtggagatatgtgatcctcccaaacgggaagacacaaggcccaaggccaattcaaatccgataaggtagagatctggaatagacacaacaggatctacaaatgcatggaaatagtgtgacctatgaatgaagacatttgtcaggcttctctttatttggctgactttagaaactactgccagacattttctcctttaagttctagatctatttagatggtatttggcttgaaacagttaaataattcattagcgcaacactcaaatctagggcaggcaagatggcacttgccatccaagcaagacaacctgagcttaatcctgagaatccacatagaatctagtggtttgtattcaaattttagccgagtatgtgagactaatgagatggctaagtggtaaagtacttgccactccggcaagaaaactggagtttcaattcccataaatgacaagaatgctggatgagtggggcagcccacctataattccagttcctgagacaggggatgggattccccgtgtaaattagccagtgaaactagccttatgggcgaattctgggtttaactgatagaccaggcctcaatgaataaagtagaagagctgtgaaggaaagattccctgtatcatcttcaagccttcacatgaattcacatacaaatgcacccgcacacacatgtacccatgcgcatgcaaacacaccacacacacacatgcacaagaaaagcatcccgtggtccagtttctgagattcatttccataaagttccacatattcttataaactgcttaatcttcctctggatatagttatgtcttgcattcaatttttattaaccagtacagcacagcacacatgcttgtgcaacctgggatggttgtgaggttagtcatatgaccttcctgtggcgttttttgtgaagatcaaacaggtaatatatgcactggtgagagtagctccttatccagctcactattagtgtttgactctctccttatatcgtctataatcttccagatttgttcttgttcatttattggtttgtctttcaagacagtttctctgtgcaacctagacggtcctagtactctctccatagatcgggctggcctcgaactcaaagacccacctgcttctgcctcccaaggcatgtgccaccaccatctgactcagatttgttcattttttacactttatcttagggcagaattatatacattcttctctaagagctggccatggagttttaatggtgactgacttctcctgtgccaatgaccttgtactacaatggtaagttaagtaaatagaatcactgggatctgttcaagggtgatgaccttaccatacaaagcatgtgtaaatgcaatgtctctgggtaaacattaataaggaaattaacatttgctattataatttcacagcacaatatctatgttgttctttccccaattttttcatgacaaatttaattccttctgcatctacttccaccaaaagataaaaatgatgatgcagggaagccataaagtctctcttaacctggccacaggaagaggaaaaaaatctggccattgattcccctttgtttcctatgaggaaaccgcttttagctcattaacttctcatttttgtatgactttgtcaagtttatatctcttatggtataggtcacaaagctagaaatggggctatgtaaagaaaggaagagtcttaagggaggtaggagaaagagggtaatggaatataagaaaatagaagtggggattaacttgggaagccagacagaggcagagaggggaacggaggagaacaaagtataccagtatatatacaaagatgccatgatgagacccgttacaatgtatgataatccaaaacactgatttagaaaagataatgccttatagtaatgtttataggaaattaccaaactcattaattagcatagcttatatttttaaacctttagtcaataaagctgtcacatatccaagataatatggttaatttgaaatggaaagtcttattaataaatatgtttgaagaagacaacagtgtcattatgatttatctgaaacatcccccagaggctcatgtgttctgacacttggtccccagctgctggcatccctttatgaggttattgaacttttgatatgggggctctagctgctggaagtgggtcactgggtgagccttgaaggctatggctcccgttccaggctcatggtctctgtgtcctaggcagtcatgatatgagggctctccactttacactctgctgctaccagatctgctgtggctctatgccttttccacatggtaaagtgtgccctctaaaaccatgacccaaataaacctccctgctgttcttaaattccttctcttgggtcagagcattgaggaaaagcaacagagacaagtgtcatcaaatttcctaccagagcatcaataacctagtgagaactaccttcttgctttcttcttctctgttcagactgccaaccataccgtgtacttccaaaattcttgttaattcggtcaatcttaaatcaggtatatgctttttttcctttttgtttacctcattcgttcagaaaatattcacaagagctgggtaagtgactcagtgtcagatgcctgcctagcacatatgagaccctgaattcaatacacacacacacacacacacacacacacacacacacacatttataataatataaaagaaaacttgaatttaactcttacccaagagaaccagataatgttagtaataagataagctaagaaaaagatcagacaaaaaaaaagtgaagttttctgtgtgtcaccacacctctccttaaatctacttggtcagcatagcaattagaaaaaagcttgcgtcccttctgaagggactgtcattactccctgagaacctaagttctgagaagggacagaagaggggactgttcctcacggtttcctaaataacactgcccccttgtggtctaatcgtgagttgtggcaccgtttcaatttctcatgatcaacaggcagtaagaattaacttccaaaaaggctttctgtttgagttggatcttgtagagcgaagaaagctatctccatgttatcttacgcattctaaataaaatatttttctacaaatcagccccaatgacaattcattcattcattcacttggtaactacgtagttaccaagcaggagacatattgtgcaaaagttactatgagagtgaataagaacattctgtgtttatagaacatgagatgttattccttcactgcttgaaaacacacacttttaaagctgtgtttgagctcaatccaaatttgccactaattgtgtgactttggacatgtcacctaaattgtcacccaggtgtctttgtgtgcagaactggatatcagcattgcctgcttcatatagatacttagtgctctgtgaaatattaagaggtttcatagaaactgatattttctcagatgaagaagccttggggaagaggggttaccaggcacagtttttgtggtgggagaaaagacgcattctccaggatccatgttgataatgttcgctcctcaaaaatcaccaaagcttaggtaaaacattgctagatgcgtaactgcttgtacatataaaaacctgaaagccaggtgtatatttgcctgtagatacaaaactctgaaagctgtcagaatgcccatctatggcaatcaactatactgattgtgctacatctgtacagtgatgtcgggaagccagcctaagaaaggatgaagcagagctgtatgcattgggatggctcagcctcggtgcaacataaacagaaaactggaatgcacaaccacaagctgtgtgctctcatttgtttaaaggtgagctaacacatgcaactgtattcaaaggcgtgccgactactgggcagagaatattgtacttatcagtgtcctgaccgccttaggatgctagaatgtcgtcagaacttaggggctggacatttaaagcctttgcaaatattgcccagatgaaaactgggcttctagaggagatggatgtgacagttaatcacatatgtgggttgggaatcacctagatggcgacctctgcatgtcatgtctctgtgtttaaagaggtttgacggaggagagaagacccaccctgaactcagtggcaccatcccatgggctgtagttcaggactacattacaaaaggggtggggcagttgagaaccagtatgcatctctctgattcctgactatggaccagtgtgagcagctgcctcacactcctgccaccacagctagagacactcctgtcaccttgcctttcttgccctgatggacctacaccattgactaaaataaacccttccttaagttgcctgtgtcaggtaatttgtcatgagaaaactaatacatcatactaatacatgatctggaaagcaggggtaaggaaaagccagctttctgcttgttattgtcctcaaatcaggagacagaagcagagaggtgacagtggtgaagtcactaggccacccaggatctattctctatcttgcagatggaagaagtcatggactttgctttctgtggctgtattcttaagcagtggctccattccaaccctttgatgtcacaaagacctggttccctaaattaaatcttatctgcattcgcttctagcactggacagttagatacttagaaaacaagtatttgctctgttgtggttaatatgaactgccgacctcattttgaaaggcagcccagatagctggtaaaacattaccatgggtgtgtctgcaaggtgttctccgaacacattagcatttcaatcagctgacctagttaggaaagtctgccctcagtgatgtgggtgtttcttgaaggcccagaaagaaaaggtaaagaaaaggcaacttcccattcttccaagacactaaagctacaggctctccaacctccaaatttggagacaaagactggaatcccctctatcacgtaccctcttccagattcagcctggagcccacactttccctagttctccatgatgctagcagcagcagatcatggtatttctgagccttggcagtctcatataaaatatgacccgtgggttctgtttctccaagggaacctaagacaagtctctacctggaagagaggttttccttttcctcatgaaccttagtatgttatcagaaaatgtgtgcgatgaatatattttataaaaggtagctctatgagtactgatctgaaatcacagctgtgtcattaaacttttaaacaatgacaactgtgttatatatcttatttctcaggcacatggggaaaatccatatatagacgctacatatagttttgaacatatccaggcacacagaaacgtgcacacaaaaatacttgtttgtaaatgttttctgagagcctccagatagctggatgaagggattagagtcatcaccagaccctgtgaaccttagtatcttgggccctgtacatgaactgcctgaaaaataaaaaaataaaaaaataaaaaaaacaacctctagtaagtttgaaaaagaataatttgctttagccaaggcactggtatcttgtagctgataaatgggatgtaagctggtgtagttgattgtttttactctttgttctttaggggcccgtcacccagctcccaaataaatacacatgtagtttttattattacttataagtgcttgactttagcttggcttgtttctagccaacttttcttaaattatcccatcttacttttctctattctatttactttgctttacctcttactctgagactggctgtgtagctaggttgctagcccctggtgtcctgtttttacttctcctccatctctcctcccagagttttccttctatttattctctctgcctgccagccctgcctatcctttctcctgccttgccattggtcattcagctctttattagaccaatcagatgttttaggcaggcaaagtaacacagcttcacagagttaaacaaatgcaacatgaaagaatggaacacaagccgggcagtggtggtgcatgcctttaatcccagcactccggaggcaggggcaggtggatctctgtgagtttgagacccgcctagtcggcaagagctagttccaggacagcctccaaagccacagagaaaccctgtcttaaaaaaaacaaacaaggggctggagagatggctcagaagttgggagagcgctgattgctcttccagaggtcctgagttcaattcccagcaaccacatggtggctcacaaccacctgcgatgagatctggtgccctcttctggtgtgcaggcatgcatgggggcagaatgttgtatacatagtaaataaataaatcttaaaaaaaaaagactggaacacatctttgcatcattaaacaaatgttccacagcataaacaaatgtaacacatcttaaaatgataatccacaacaggctgggtcttaggcagcacaatctaggagaaaagggcacactgggattttgaaactgaaaggaaacctgagtttcctactccatttgtttttgtttagaaatcattcactttcaggtctagagagatggctcaggggttgagaacattggctactcttctggaggacctgggttctagtgccagtacccacatggcagcttgaaaccaactgtgaccctagttccagggaagccaaagcccttttctggcctcctcagtcactgcacacaagtgggacacatacaggcaagacaactatacaaataaagttttaaaaataattttaaaaaattttaagatcattcatcttcaaggccactcagctgagcaatatagtactttcccattagctttactataagcaacacctctagccaggtgtggtggtgcacatctttggcctcccgcatatatgtgacatttgtgtagcttggtcttcttgtggaactcctaacagtgggagcaggggctgtctctcattcagttacctgctttggggactctttcctctgactgggttccctcatctggtcttaataggagaggaagtgcctagtcttactgaaacttgatatgccatggttggttgacatccatgggaggcctgtccttttctgaagagaaatggaggaggaatggatgtggggttgggagaaagacggagtgtgggggaagagactaggaggagaggagggagaggaaactgcagttgggacataagaacaataaatattatctctgtcatgttttatgttctttttatctgctgttttgtttatatttatacttgtctatgaagaaaggctatgattggcaataaaaattaattaattcagctaaatttttaaaaaaccctctgaagtgttgatcatgatgctaacagttgcctagttatgtatgaaggccattttgctgaaaccatcaactcttcacttggatctatacagatgtcatcttttgatatcagaaagccaaaatacaaccctcaaaaatgtggaatacacctttttgtatattgtgaagatgtgtcactctgattggcttaataaagagctgaacggccaatagctaagcaggatttctgtgcagagaggatgctgggaagaagaaactggagatgccaggagacccagagcaagcagaataggcaaaagggaaatgaggtaataaagccacaaggcagaaagtagattaagagaaatgggttaacttagaagaactagtcagaaacaagcctaagctaaggttgaattttcataattaataagtctctgccatgtcattactggggagccgtgggtcccgaggaaaaagtctgactgcactcaaatcacactaatgcagccattttgtggacatgtgtcttatgaaaagacatgatctaggcatgagccacatttcatgccagtattcaggaagctgaggaagttggatcttcatgagttcaaggccagcctggtctagagggcaagttccagtctaactagggctacatagtaaggccctctatggaaggaaaaaaccctgctggtcactctagccagggaagcagaagcaggtagactaactgcagatcttcacctctccctcctctcctccaaacccaaccccccagtctcacctcagctctgtagtagactaagacactgtggcctctcctcactctctgtccccattctcagaagactcagtagatcctggtgaaacactgcttttttttcctcctgtgatcttcctcagccaccaccacccctttcgagcccatctgagtcttaagagctccaaatacctagaaacccattctacctggaaccccctgtggccacacctaacagaatctgaagaattccttaccaggcaacacacagccaccacactctaagaaccagacggcaacagaggacaaggaacaaaacacccacccaccaaaaaacagaccatatattagcacctagaattacaatcttctcaaacctagatgtctagatgctaccgtaaaaatacaatcaataacagccaatataatatgtctccactggagcacagaaaccctaccacagcgggccctgggaaatgcagcagagctgaagcaacgacagagacattaacacagccctcatgaataacatagaggtccctccctccctctcattttgttgtacccctcttccaagtcagggtttctctgtataacagccctggctgtcctggaattcaccctgtagaccagtctggcctcaaactcatggagatccacttgcctctgccttcccacccccagcgctgagattaaaggcatgtgccacccttttcgtatatgttataaatgagcaaatgagcaggtctctgcatctgtatctgtttcttgtgccttttcttgtgctcttttccttctgttttgtccaattccaatgtatttttttcttttctcctattatagtttatctcttttatccctgttttctaatgagatatggatgggaggacagtgggaaggagctggaaggaattgagaattgagggaggggaaaaacaatcaggatcactatatgaaaaaaaaactcaattttcagtaaaagaggggagcatgggggttcattgtgcatgtgccaaccactgattacacctgtgcccaatctaacttttcctatgccacagacaagcctgttcttttcttttcttctctctctctctctctctctctctctctctctctnnnnnnnnnnnnnnnnnnnnnnnnnnnntatgtcatctagtaaagaaacaaagtggtgagagcatttaggttgtcttcaacataagaaacctcaagtgaacagaggcttcctaatgttctaatgtaataaccagtgttgccacaaccccaggacctcagggcatcagcttgtagtgaataaacagaatgctcatgtgtacacttgagctaccatgtagacagctggagaaacattagctctaagcatatcgggcaggacaattccagaagaaactagaatttgaatctgtaaggaagaactcagccatggagataggtgtcatccagttggctcaaggctaggaaagaagagggacagaaaaatgaattccccctccccatccctgtcagctgaaacactcttctcttgcccttggatgtcagaaaggggccttcaatctcagaatgaaaattattctgttgactttggacttggttccaagtccttttgacttggaccgagccccactaccaagtgtgtccccattatctggcttgctagacaagcctatgtcagacatagcctccatgattgcatgagccaatctcatgatagctatcatcaatcatttttgtgtgaacctcaccatgctttctttcttaattattctggaccatctggcagccttcaatgccaactaccctagctgctctctcttgctgtgataaaatactgtccaaaactgatttgggcaggaaagagtctatttggtgtacaggttacaagcctactatttatggaaataagagaccatggaggaacactgacttgttctcaaactcaagttcaactaccaatcttatataccctaggctcaactgcctactaatggcactgcccacagtgggctggaccttcctacattagtaatcaagaaaattcgacacagataaacccacaggccagacaattctcagttgagattctctcttcctccgtgtgtcaagctgaaaacagaagctaattatgacaccagctggaaacatttcagtctatcccacatcttgactgttcaccacatcactcaacatcatctgatacacaattacgttaccaaacttttccctcaactacgatgttagctaaaatagaccattgtccattttgttcattttgataactgctggatctcaatgtctcaaattgtggggaaccaaaatatttccgctatggaatatttttgagatccagcctttggtctcactaaacatggagcaccattattgtattgttaatgccagtaaggctactattgttcacatggcctcagggtaatatgcctcctaatttgcatctctatgctcctaagcatctgaataggccctcacctgggcggaggtgctagaggtgtgtgagtaacttgtgaggatggaaggttaggagtgagggaacaaagagagaaatggttccctcgtggtattgacaggatggttaagataaaccagaaaagatggctaataaagaaatgactctagttctacaacgtggaactgaaagctctctaaagatgacaagatgcctgtgtttgatctttatcgccgttgggtggctaggagcttccagatccacactcccactcaggtagaacctcatggttgtcgtgggttaaagatgagacatgccgggtcacgacatcaaatcaagaagtcttcagtcattcaatattaaaatccactcagtcaataagtaagaaaaatatatttattgagagttccaaaagaacttcatggaggaggaagaagtacaggcaagataccggggagggaaagccagcaggaatgaagacaggttttctggctagtgaggtagggcagtcgttggctttattttttcctcatataagatgcattctggaaactgctttctctgttgaagaccacaacatagcattcccagcctcccacatctccctagagaagtggctctcaaccttcctcatgttgcaaccctttaatacagttcctcatgttgtatgaccccaagcataaaattattttattactaatccataactgtaattttgctactgttccgaatggtaatgtaaatatttttggagatagagatttgccaaagggtgtgcggcccacaggttgagaaccagatttttttttgacttagaagaacaatttcactataaatctggacttgtagacagcctgagtaaggtataccacccctggtccaggcaactgtggccaaaggaatagataacatcatctgccagcaaatggttttcagtttctcagggatactttgttcaaaggcaaaactatccatggtcagacgtggttagaaatggtcaaacttttcttaaatttttaacttggaagtatgccactgagaaaatgactccaatcacattcaagggagtctttaattaatgtttggtagaattcatttgagttcaatcagtggagttcctaaccatcccatttgacatcaattccttaagcaatttaatagcacaggcatttgagaaatttgactagaaacagacagaccttcccatatgtttaagtttgagttaacataataaattaaacataaatgactaagttccagcaacatttcattatttttgcatccatggtaaaatatcaaatattttccaactaagaagaacaagtctaagaattcattaagcatttgactcctaaggccaacattacatattgaaatatgtcaattatgttaaaacacttcacataaaaagttaatagtttcaatgaatacaaaaacaacttctgagttgggtgtggtggcacacacctttaatcccagcactctggaggctgagacatggatctctgtgagtctgaggctagcctggtctacatagtgagttccaggacagccagggccacacagagaaatcctgtctcaaaaaacaaaacaaagaaaaactccttaacataattgcatggaggactgtgagaaagtctcctaatcctttcaagggtctgtaattactataaattttacacaggagctgcaacactcttagtttgtcaaagggagtgagtagttagggtccagcaggcgagagcaatgcagggatgataaggaactcaagcctggggaattgagcaactttaatttaacgttagttacaagagaatgactgacactcactcgggtaggtgtgagaagtaaatgaagtaatggccaggaaatgctccagagttgctcgggggacagcagcaacagctttaagatcacaattgcccgaacaaactctgcatacttaggaagatttacttcaatagctgtatttaactaagtcaaccttctcaaccttaaagcacaggctctcatttgtgactaatgttgtaactactcaaaaaaagcaagctccagggttctcacaagacacagtatcatatcacagaactgtttcagctcactaaagagaactatactctatcgttgagcttgtgtccacaccagaacattctagacatatccctactcttctgctttaaggaaatctaaattcacaaaactgaatcattacaaaatctttccccaaggactcctttagctcaggatgccgtctccagatacattgctaacctaaggacggtacctgaaggaaggtagggcagtaaaggctgtggatcagtatgttgctcacaagtcactgactgtcatcaggaattgagacacctcagaaagccaagaagacgaaaagaatctctttataaaaaatatagtttacaatgaactttcaaaaacacaatttttcaaagcaaactgctcctgtttgaggttcagacccacacaatgaagaacagagaaaaagaagcggaagtacaggaaagagaactgttatctgctccgaacacacacacaggctaaaaggccattgccgtaagggaaaggacagcccttctcacagacctgaggaaggtgaggatggaaggaaggcagcagaccatgaggaggggatctggttcagtcaggtctctctggactttgtcctgcaaagaagcagagacaggcaagactaaagaaaacaccggtggagagtagtttgtaggtaaaagactcatcacaccctaaatacgattctaggagcaccagtcagtgatctgccacacttggaagacagtcccacaaacagctggtgagaatgtgtgaccaggacttcgaagacaccagtaaggagtgaaagttctcaggggcactgagtacaaagaaagaagttttgcgttgctgctgttcttggtatttcccaggctagaagtagaaaacaaaagaaaaaccaaggttctgttcacttggcagggctccacttgggaccctctccagctggccacataaggccccacagcaactgagggtttggctacattaaaatcagtatcaactcatccaaggtcgacagacactgtgcccgagacaactaagttcttctagtggaagacatcaaaagataaatcaaattaatacatggaaaaccatgtcttgaaacaggtacttatttcccaattataattaatccagtctcttccataaaactcctgtaaattatcttattgaatgtcttgaagatgcttccttctcagtaattaagagttaggagttcttgtctgtgtcaccgggttgacatggtgattctgtcttctctgggagttcagcaggcacattctctgacagagagacactgtcatttcttgacatggtggcgaacagcatgtccatcatccccaaggtttccaggagttccctttggtaatcaatttctttttctacgagtccttgaagtactataaactttttatcaactactggtgactggccaatcacagggagatatatatctacaaagggcagaaaatacattaactagaaacattttctgtaggtgaaattgatacaaacagtatggcactaaaatataaaggcactgaataccagtatttttaataattaatttgttatttacaggaagcataacaatctatctgactaaatacattttgaaaagaaataattacacaatatatacagcatggggtcttattttcattttcatgttaaaaactagatgactgggggctgaggagatggctatgggtaggagtgcttgctttgcaagcagttaagatctgtatttgattcccagaacccattaaaaaaaaaaaaagaaagaaaagaaaaagaaactggccacctggcatacaactgcaatgcagccctggggaggtagagacaggtagcccagggcttgctaggcaccagctgagctctatgaacttcattcaggttcaatgagacagcctgcctcagaaaaacagatggagagtgatggggaaagacccaggaagctgccctgtggcaaacatgaaacaatgtgtcaggtacggggctgcaggaagagatgtagcacaggaaaggcatgggggtgcaacagtaagtctcaggcaggaccaagtgagatccagaaacactgaactttagatgcataaatgaaacaaaggaccctaacataaggactcagaagtagacagggtgaatccccctcactgtggcttcaggaagagagaaaaggaccactttggttggttgccgttacactaccgggctctctaaaaatctagaaaaagagctgagactcacgcagcaaacatgactcagtttgttcatgcttgtcacggtgaggaatcaccttatgttactaatctcttgtggaggggggatggggggacaacaaacaacacaacacagggggacacgggtgacagggacacatatatgacaaaggatcctctgtattttcttatttccaagccccaaaggcctctctactctactggataagaaagtgtgcatcacaaaagtccatgtggacttgggaaatggttgtgacttggacactacatcagatataaggattaaatgatagaaagctagaagcaccctctactttttactgcagttgagaactgccaagtggaagaacaaaagaccaactgcatgggaattcaagggaggaaggggtgtggcagagactggcctggccagagcacttaggatcactcagtggtagcttagttgccctcagcgtggatcccgttgggcctaactgctttctacattctaagccccagagacttttaagagaaatgcaaccactacttggtgtttcccacgcccccaccgggactggtagaatacctccataataaagcagcaccctgcctggtggccctctggctcatgagagcagcctgagggtggatgctacatgaccctcactactgaggttgcacacagacatgcaggactcaggccagcaaccctccatctcctcagcaggaagtaatacactgtccccgcccccactgttttgtattacacttgctcaagttctccttctcacactttcatcctaaatacttctttctcctatcttgcctcttctctttcctttcactaatctccattgttatttataatatttttaccttcactgagttttaaattcctagctaaccctatcactccctcgggtgggccttactcttccttcttactggggtatagctgttctcaggtggtttgctatatgtaaatatgggtttggctcagccatttactgcagcctgctttctttcctgtgtgtagcagacatagatatcaagcaaaggtctccatacagactcagcagagatatccatcccaagggatgtggaaatcacaatggagaatgggagaaaagcagagcagcaggactcttccacaggacgctaactcttcaactgctggacctgcagacaccgatggagctgaaatacctaacaaacacaatgacctcaaagacgcaaccatgaaatagatgaaggaagtaaaaagtcagaccaaatgcaaaccttggatatgaatttggattaagtcaagcaggagaaggtgggagctcttaggctgaggaattatcacatccattaatacttgtcaacaaccaaagcaaatacactcacagatttcaaggactctagggcacgacaaaggaaaaacaaaaaatctaagtatcttcaatgtagaagcatacaaaatctaggcaatgaaactggagcagaaaatttcaaaatccagggaaagatacagacatccaaatacaggaggcactcaaaacctaaacacatatgtccagaaaagaaccctcctacattgtccaatacctagcatggaacaaaacaccaagttactcacacagatgagttcatcactaggacactaggcctgtcagcaaagcaagggaaataggaagtgacgtcaagccctaagaggaataaccaccaaccaagagaattccatccactgaagtcttcctttaaaactgatggagggaatagattgaagccatgaccactaaaccagtgtaaggacagcgacacggaaggaaagtcaacacacaggtaagaaagtcacaatcacacaggaaattgagaaaataagtaataagagaaaatagatgagtaaaagaaaattaggaaagaatcagatgtttccaattcaataaaccagcaaatctctaagatgaatagacaaggaagaaaagaacagatcaactgggggaaacaaggatcttataggaattagcacacacctctcaattctaaccccaaatataaacggcctcacttcttcaattaagcatgcagacatggctgtgcatagcgacacatgcctataatgccagcagggggcctgtgctcacacacattcatataaaccatataagcatgaagaaatacacacacacaataaataaataaattaattaaaaaaaagaaagatgaccattatagatgtttatggggaaaactttcttaaattatacttatcctagtctcgtcaattcaaatctgctactgtaacattttactacattttaattgcacctgttcctctaggtttcctgtttcaggttctttcactgtttttcaatgctgaggcgcaagtgcaggagccgggacaggctgacacattctgccgctgagctctccagtccaaggcctcagctctcacagcatgttggaaagcttatgttttacgacttaccaattactatttcagcagcattaatcagaacaggggcaaatctcggctgagacagattcctacaaagcaaaacttctgtttaataatcttgcaaggcctatccctggcacttaagctggcatttgggaatctattccccatgctgagttgcctcgcccagccttgatgcagcgggaggagctgtgtcctgcctcaacttgatgagccatgctttgttgatgcccatgggaggcctgcccctttctgaatggagatggaggaggagtgaagggggaggataaagggagaaggcatgggaggaaaggaagggggaaaaactgtggttgggatataaaatatataaaaagtttaattaataacttaaaaaataaataaataaaatccctaaaacaaacattgttacaccagttctctgtaaagagcaaactaaaagtagatgtctctcaccgagtgataatggaggacttaagccacaaagccaagtcaagcataccttatcaaaaagttcagaacccgggtaatctccttctcatcccgacctgcaagagcattggctaggactcctctccgattcaattcctttatgatggaaactgtaacctcgggcgtctttattacacaattaggctagaaaaatgttcagagtcagtacagccaaaaggacggacaagaaaaagatcactaccctgcactaaactgccaagcttatctccacaatcccaagtcatagtaaatcataaaccatcatcaagatggttccccacatgtcctttcactttttttggacagggtctcactttacaagccttagcaggccaactttattatatagcccaggttgaccttactccagagactatttttgtttttttcttttttgggggggggaggtgtggggggacagggtttctctgtgtagccctggctgtcctggaactcactctgtagaccaggctggccttgaactcacagagatccgcctgcctctgcctcccaagtgctaggattaaagatatgtgctaccgggctggagagaaggctcagaggttaagagcattgactgctcttccagaggtcctgagttcaattcccagcaaccacatggtggctcacaaccatccgttatgagatctgatgccctcttctggtgtgcagacatacatggaagcagaatgttgtatacaaaatgaataaataaaatctttaaaaaaaaaaaaaaaaaaggatatgtgctaccactaccaggttagaataattcttcaaatactcttcactagctaagcatggcagctctcaatgctgggaggcaaaaacaagaggatcctggcagctcactggcaacctggtgagctccccgtcttagacagtttatcacctgacacaagcaagagtcacttgtgaagagagaacatcagttgaaaaatgtctccattgtactggcctgtggacaagtctatgtggtattcactgtggtggtgccactcctggcaggtggtctgggttgtacaagaaaaacaggctgagcaaaccatggggagcaaaccagtaagcagtgttcctttatggtttctaattcagttcctgcttccagatttctgccttgggatcctgacctgacttccaatttcatggtattataaactgtaagatgaaacgcctttcctctccaagttgctttggtcatggtctttacattgcaacaaaaagcaaactaagacagatatgatctcaagaagatggaatgatctctggccttcccatatgcatgtaaatgtaccctatcacacacaaaaaaattaaaaaatagtgtgaaaagacaattattctcactcacctcaaggactctgtcaagtgcctttgagatccgaaaacttttcaggtccttgtcataccattctaggtgtttctttgctggcctattgatcatgatatcatcctgaatgaaaaagtaaatttatagaagaagaaagttagtatctatatagttccattaaaaataaatgttttccagtagagctggccctggcgatatgagtaagggagacctggatgtgagggcccaagagcagaacttgctacagctccttgctgtaggctgcattgggtgagctagccaaggcagtgctaaagagctcatccaggttgtgaagatgagggaaagctagtgatctgaccaacccagccaccacccaggcccaagagttggcccaccccagccaccaaatctatgaactgttgaagcatgtgaaagggatgaacctacagttccaaaacagtatgacatgggataacaacaagatgtccaagaggagccccagtgagagcccattaacattagtgtagcataaaccagaggcctctgatcagaccaatgactcctggtaatgaatacttacaagtaaacatgaacagactaaagggtaaactgtgtgtctcaactggtcacactacagcttccatgacaggattctttttttgttttttctttgtttggtttttcttttaaatttggttttgttttgggggttgcaagggcagagagcaattcaaggggatggggagataagtggggtcaaaatgcatgatgtgaaatccataaataatcaacaaaagaaaaaataaatatttaagtaggtatgttttcacaataaagtgatacatgttaaagttaggatgcttttacaccacacaacaaataatgtttctatgttcataatccaagtgatacattttgccatgtcaatgtgctcttatgttttttagcttactcaaaaaaaaaaaaaaaaaaaaaaaaaaaaaaaaaagcagtatgaccacatataaaaagaagtaaaaaacaaaccagagactacaatgtaatcgtcacacctctgatgagctcctgggtcattagaactttacatctcagtcctctccaacaccagggagacattacaggcacacgctgttcagaggaccaaatcagagagtgggtgacagacactattttgaagacggtaaagcactgtattatttcatgattcagggtactaagtaagtagtccctgttccccattattcttcaataatgtactacagcagtctggaaccaactttgatggagtgagaagaaaataatgtacatgtatgtgaatcacactttgcagtaaattccaggaatgggtggaattgactcttccaagaaatatcatactttcaaaaggataagaaacacataatcacccgttgcttcatgtaaatttttcctttaacaaaggttcggtatgcaggcctcctccttcttgagagagattccttctttgcttcagatttccggtgtttaacgctcagtatcccattagtcattcccacaactatcgtctcatcttcatgctaatggtaatcagaaaaaccattctactttaaccaacatcttacagtacctttgacttgaaacagcatttgcatcacgtctgctatctatcttactgcccacagttcgagtcaatacagacagtgatctacccaaaatgttacagcaaattcacttttcctccagggtatcactatcgggacagcccttcttatgcttgtacagtactgccagtgaagtgtatgtaatgagaatgatgatgttggctgatcatgctaataagatgctaatggcatcttgacaagtttcaaaataattttctatgctctctgaatagaaaaaggattacacaatggcatgacttttgtaagctggctccccacaacagctgctcttgactcttcttctctaggttgaaatttccatataacatattcaggtatcttctggccaaatgtggctcctcatgaaacccgacagtgaacactccagaaagcacattgctcactcagctgctcctaccctctccacttttctggggccaatctgccattctcgagctttgtaacacccttgggcttgttgaagggagagttaacaacatcctaatccagttaccatgatagcagtcagtgccaccaagtgggaattcatgtggttaacaggaaacatcacatcctagcaactgtctttgttagtatttgtttagtatttagacatttgtactggcctgtccttggggttctgacaggatatgccctcagctgctgccactaagagcaacacctgtgcctattcactgtgttccctttcaaaagggccctgccctcctccatctctctctctctctctctctctctctctctctctctctctctctctctctgtgtgtgtgtgtgtgtgtgtataccctgtcttttctctctcctgctgttcctgtccctggaggctagtctctcttcttcccttcccccttacgattcttttcccctaataaaaaacctctccacttgaactctgttgcatatctttctcagccactttttaaaaattacaacagtcttgactcaaacatcgaatgtaccttatttgaatccaaagataacccccaaagattacactttacttttacataatggcataatgtgtaacaacttgagaagaactgaaagtacatacagacagtgccagactcaagatggaagctgcatagtcaaaactgtggactactttgtaagaagttgtgctgtagaccttgactttcctggtgagaaagagagccatcaagtcaccttagaatgagtgaaaataacaagtttctgtttttagcacactatatgaatatgaaaatttacacagtctaaccgggtgcttgcctttaatcccagcactcgggaggtagaggcagtcagatctctgtgaattctaggccaggctagtctacacaactagttccagggccgagggctaaacagagaaaccctgacttgaaaaataaataaataataaagtaaaatttgcacagtccagaaaaacactgatgtaatattaattacaaagtacttcaccactgagttccttgaaaactaactgtatttcagcactaaccaagtttgaataaagactgactaggaatttataaaagaaaccaaaagacagaccatacaccaaggtcatcagaagataaaacaaaggacctatgaaaatgcacagtaagccacaaggtagggtttccaagcccaataaggccctctgttggggacagtagcagcatctctggccatgtcttttcctaatagcagggaagaagtacaacctggagacaaaatgaccatcagaaaaaaaaaggaaatcctacagcctgtcagtactacccatgtgtgactactgaacccttgacatgtagctacagaaaaggaggtaagtttaaaaaccattgaaacatttataaagtattatagcataccatctattttagagacaaaattcatttctagcatctttctaagtaaactgattacatgttgaaatgacagttcatacgagttttacttttatgttagataatgaactacagtgaaataaatatgttactaaaagcaattttttgttttgctttgtttttctagacagggtttctctgtgtaatagtcctgggtgcctagaactctctttgtagaccaggctggccttgaactcacagagatccacctgcctctgactcccaagtgctgggattaatcacacctagcttttttttttttttaacatcttttaatatggctactaaagcatttaaaattacatatgcaacctgcattgtgagtttgtttgacaacacttttaaatcatcgaaagtagaatacttcaattgactatttaaatgacttcagtgctggggatagaatggccttgcaaatactgggtaagtgctctagccactgaactatgcctttagtgctctagaaatttacttaaagtcatagtacttgcaccacattaatgcacagaaatattcatatgaagtttgaaatcttgtttgttgtttttgaggcagagtctctctgtagccctagctgtcctggaactcactatgtagaccaagctggccttgaacttagagacccacctgcctttgcctcccaaatgctaggattaaaggcatgggctactactcccggttgaagttttatattttaaagaatttaacctaaaataaaatatatcctcagaataaaattttcaaaatacatatgtatatataaaatggctttaaaagaaactatgggaaaatagactatttcaaaagatcagtgttcaagtatgtaagttaaagtaataaataattatttctggggaaatataagtagttatatgaaaattaaaggtcaaactattttcaagtcaatagatttatcctctataaaaaccattagaacctttttaaatcacaaatactgctaaaataactcaatttctcaagcagtaaatgctaataacaacgcacaagaaaactagaatgctacctatccagtgagccggagagtaatctctgtccagagctgctcagacacaagcatgtcacagtcttatgatgatttttcaaagacacaagcaactgtcctccttttaacatgtcccagactttaacataacgacctcctgtggaaagaaataaccacttgtgtgagattctgcatatgctcagaatgctggagatctgagaagcactcctcactggagctaagtgaagcctccagaactagacctgagcttaaagaagcctccagagccagaccctacctgctggccacacacaccttgagagtccctaccaacagaaatgttaacatgactaagttattgcttattttaggtacagcaaaacaaatagggagctgaaaatatttcaagtaaagtataataaatttgctgagagaaatactgggtctgcaagatggctcagtaggtaaagacacttcccagcaagcctgaagacctgagtctgatccctggggatgacccggtagaagataggtggctccggaaagttgtcttagctggaataacagaaggttatagagtagacttctgaggtcagatgggacacatacataatctactaagttctcacggtctgggactttagacctgccactcaccatgttgccttggacaaactagctgatgctttcattatttccttaattgtaaaacagaatgccaactacctgggagaactgtctagcattagaaatgacatgaaaacagcagcacagtgccagtgtgggccagacacagtgagtgacaactactagcccaccccacttaccaactgaacaaatacttagatgtgaaattcaagaacaccaacaatctacaaatggcaaaaggaaaatctaatctctctgagaccaatagtggcaaaagctcttttgaaaagcaatacctgaagacaccaggagacctcccgaggggaaaagcaggacactctccacaggctgcccatgctccacacagagaacattcttatttgtccgggcgtcaaacatcttcacagtgtgatcatatgatcctgaaatgtcaatgttggtattatgtgaattttgctctttaaagcaataaaaaatttgtttatccatacattaaaattagaaggagaaaaagattacatgaaattttttgaacatacacacatgattcataaagtcggtacttctgatactactgttcctaaagcactatgtaatactacatagaatcttactggctctgaccttcagactcctatctccatgtcattccctgagaatctgttcagacacctacacaaactgagctccacctacagtgctatggctgctggggctctatgacaactagagtaccatgagccactgaaacctgatatctatgatactgtcaagcagctaaatatattcccctccccccaaatacatttagaagaaacaaaacccactatcaagagaagaaaaagaaatcaaaaaataattgactttaatgaagaccacacacatacacattttatggtgctgagaattgaacccagggtctcaaacaaattaggcaagtgctccaccactgaccctcatctctagtaatgaaaatgtaagcccctccaccccaaaagaacccatagcaataaagtggagagagcccaccaacctgttacaaagagatcagggttcagcttgctggcacagccacacctcacataatcggaatgttctctgaatgtctgaatttctttggagtttggaatatcccataatttaactgtataatcatcagctccggagaccacatgatacttgtcagctgtaaaatctactgtatgaactgctctgaaagatcaaaagtcaacagattacaaaaatggggaaaactcatgcttgatgatagctctcatccagcagctggtgcaagtagaagcagacacccacagctaatcactgaactgaactggaatccagatgcagagaaggacgagtgatgagcaaagggatcaaggccaggctggggaaacccacagaaatagctgacctgaacatcagagaactcttgctccccagactgatagctgagataccagcatgggactgatccagaccccaggaacatgggtttcagtcaggaaacctcggaaatctacaggacttgctgtaggtcagtatttatccctggcataggtgtggactttgggagcccattccacatagaggaatactctctgagccaacacacacggggtgggcctaggtcctaacccaaaggatatgatagactctgaagacccccccccatggaaggcctcaccatccagggggagcagaaaggatatgtgataggtagggttttagttgtggggtggtggtagggaaggatgggagggagaagggaactgggcctgtcaagtaaaacaaccttgtttctaattcaaataataaaaaaaaactgcaagaaaaaaagataaaaaaaaaaaaaggggaaaactctaccgccttcatcttctaacataaaatgttccttcctagattcaaaaacaaacaaacaaacaaacaaaagccccctcaggttcaagccagcaagacagctcactgggtaaaggtgcttgctgccaagcctgatggccggagttccatctgggaccccccatgatgaatggagagaaccaactccggagtgttgccctctgacctccacatgcatgccaccagatatgcacacctgaacacacacagtaagtaaacaattctcaacttcagaaaatagaaaacatttatggaagaaaaaatagaaaagggaaaacctttaaaacaggtgtttgtatgtaaatgtaatactatgtaccgaagtgtaatactatgttactattaggtcaacaagaatattaagtaacagatgcaataattagtgaaagttaagttctaaatgttgcaacagaggtaatttttaagtgtttatttatttatttacttattttatgtgtatagtattttatctacatgtgtgtctgtgcactctatgcatgcctaggactgggcttatagacagtcctgagccagcatgtgggtgctgggatcccaacctcttccagaacagcaagtgctcttagccactaagccatctctccggctctgcaaaggtacatttctttaaaaacataacaaagagttctttcaaaagatgagaaagacttgccacagagcagaatcccgttaaaagaatttgttttgagtgttttagtgatgggtacaaacaccctgacagtttgcaatttaaaaaaagaaaaaaagaaacactttgatatttaaatcaacagcagagttcagcaatgactttagtgatcctgaaacagaagtcagaaaaccaaatttatcaaagaaaagaaaggtagccagatttcagtgtgagagggtacagccagccggacctacagcatcaccagagctgtaagactgccgttagaccagtggttcacattttcaactggtcagagagcccactgaacctcctaaataattagacacatacaactttagagcagtcacaagctctaggaactggatggttaagttctttgtctgagaacaacaggaaataactatacatacaggtatactcttcacacaaccaacatgtgtttatcaaaagcatggaagcagagctctcaacagaaaaacaaattaaaaaccatatcaagctggctcttactttgtatggccttcaaactgcctgaggggagccctcccacttatatcaaaaagttgaaccacaccatcttcactgccagcaacaagcagttggccatcctgtcgaaaagtagcacagtatgctgtgtccttaaaacgggaaaaggtttttataggttcttgagagtatcggccataaatgtggatctgtaagataaaaagcagtatttcactagatggcccaagcccagtagtaaatcctataacaagaacaaagatgatcactactgtacttactcttgaagaagctgtgactgcatagttatacggaggctgaggagaaaagtctactttggacacggcaccaaactccttaatctgaacaggagtcttaatgaaaaacaaaagagtattggcagagttaaaaaggcgagccatacttaagcatcacgctattttctatggatcatttccttttgatcttagtaccaattagtaggttgtattcacagagaaatatgaggaaaagaggaagaggaaagacataagaaagggtgaagcaaaaaccactctattgtccaacccccagactattcccttgacattacagaagtaaacacagttagagagtcacatcccattgtctcagcagctaactttactccaatgcccaccaagaaaaagaagagctaagcctacatcaatcaactatgattctaagttaataaaaagatgaacagaccatgtaaacagacctacatcttttttgcacccactaacccattttagcaatctctgcatataagcaataaatttgccatccatttttataaagatacaccatccaccaacccatgtctaatggacatattttccaagaattccaatattacattacatatgttaataaacattttacatatcttaataaacgtttgaaagcatgctaggcttcaagctatgagtacaaagcaaaaatgatgtttttataaaatcctaacagttattgtcaattccctttctcaattttctttctcatttatgccaatatgacagaaaaaaaaagtatctaaactgttatcttatttggttttatgttctgtttttttcatcttatttatttgtactcatgtgtatgtgtgtatctgcttgcctaaaaatgcacatgtgtgaaacacatgctgaaggtagaaaaagatactagagcccctggaactggagttcaaggctgcccactgtgctgggaactaaacccaggtcctatgaaagagcagcaaatgctcttgatttcaagtagctaagactaccctcagcctccctgagtaacaaagaatgactctgaacttaccatctggcctccacctctcaagggctgagattacaggcatgtgccaccaaagaggtttgtgcaaggctggagactgaactcagggcttcgggcatgccagacaagcattctaccaactgagcgactccattttagtttgtgagtaacatttttattatctgattatatttcattttccacaaacaacctaattgcaaacgttttctagttttctaggttctcaatttaaaaaaaaaaaaattgcaagccttactagaaggtacagagaagctaatttcagagtaagaaaaagcaagaaagtcttcctgcatataagattcaagttttacagtttcacttgtcattgcacacatgttctgcattaaacatctgcatggttaaattaagtggtatggacttttacatgaagctctaagaaaaaactgataacaaattatccacctgaactattagttttagctaacagttctgctagcataagatggagaattaagataaatggataaagaaatgtccaaattctttcttccctcatttcctcttgtactttaccttataattgttccagtacagagtgtcttgggtgattttttcaccaagtacaggatatgtctgaatcgctacaggtttataaccagccatgatttcatatagttacactgctgtcccagggtcaataatctggaactgatgtcagggaactgcagtgactctgccttatacctaaaaaataaaaaagaaaagaaaagaaaaaagcacatattatgtatacactttcacatacaagtatgattttcattctactttctttcaaaaggctgtgtggaacttcaccgattagtgaccaacaaaccatttcattggaaccctagaagaaacactggaagaatacagcatctgcagcatctgtacatactagctgtatatgtatgttctcaaatctccaagaccagtctgtaacacttgaaaataaacatgactcagcctcccaacagtccaactagaaaagcatgcaggcctagaatgcttgttttcttgacaaaggaaataacatagaactcaaaatatcaagttatctctacatatttggcttcctaaagaaaaagataccaagaagaaaggaaaacaaagctaatattttagtgtagaagcttatgatgaaattagagataatgttctgacataagacaaaaggtttaaaaatttaactgtataatcatcagctccggagaccacatgatacttgtcagctgtaaaatctactgtatgaactgctctgaaagatcaaaagtcaacagattacaaaaatggggaaaactcatgcttgatgatagctctcatccagcagctggtgcaagtagaagcagacacccacagctaatcactgaactgaactggaatccagatgcagagaaggacgagtgatgagcaaagggatcaaggccaggctggggaaacccacagaaatagctgacctgaacatcagagaactcttgctccccagactgatagctgagataccagcatgggactgatccagaccccaggaacatgggtttcagtaaggaaacctcggaaatctacaggacctcctgtagttcagtatttatccctggcataggtgtggactttgggagcccattccacatagaggaatactctctgagccaacacacacggggtgggcctaggtcctaacccaaaggatatgatagactctgaagacccccccccatggaaggcctcaccatccagggggagcagaaaggatatgggannnnnnnnnngcagaaaggatatgtgataggtagggttttagttgtggggtggtggtagggaaggatgggagggagaagggaactgggcctgtcaagtaaaacaaccttgtttctaattcaaataataaaaaaaaactgcaagaaaaaaagataaaaaaaaaaaaaggggaaaactctaccgccttcatcttctaacataaaatgttccttcctagattcaaaaacaaacaaacaaacaaacaaaagccccctcaggttcaagccagcaagacagctcactgggtaaaggtgcttgctgccaagcctgatggccggagttccatctgggaccccccatgatgaatggagagaaccaactccggagtgttgccctctgacctccacatgcatgccaccagatatgcacacctgaacacacacagtaagtaaacaattctcaacttcagaaaatagaaaacatttatggaagaaaaaatagaaaagggaaaacctttaaaacaggtgtttgtatgtaaatgtaatactatgtaccgaagtgtaatactatgttactattaggtcaacaagaatattaagtaacagatgcaataattagtgaaagttaagttctaaatgttgcaacagaggtaatttttaagtgtttatttatttatttacttattttatgtgtatagtattttatctacatgtgtgtctgtgcactctatgcatgcctaggactgggcttatagacagtcctgagccagcatgtgggtgctgggatcccaacctcttccagaacagcaagtgctcttagccactaagccatctctccggctctgcaaaggtacatttctttaaaaacataacaaagagttctttcaaaagatgagaaagacttgccacagagcagaatcccgttaaaagaatttgttttgagtgttttagtgatgggtacaaacaccctgacagtttgcaatttaaaaaaagaaaaaaagaaacactttgatatttaaatcaacagcagagttcagcaatgactttagtgatcctgaaacagaagtcagaaaaccaaatttatcaaagaaaagaaaggtagccagatttcagtgtgagagggtacagccagccggacctacagcatcaccagagctgtaagactgccgttagaccagtggttcacattttcaactggtcagagagcccactgaacctcctaaataattagacacatacaactttagagcagtcacaagctctaggaactggatggttaagttctttgtctgagaacaacaggaaataactatacatacaggtatactcttcacacaaccaacatgtgtttatcaaaagcatggaagcagagctctcaacagaaaaacaaattaaaaaccatatcaagctggctcttactttgtatggccttcaaactgcctgaggggagccctcccacttatatcaaaaagttgaaccacaccatcttcactgccagcaacaagcagttggccatcctgtcgaaaagtagcacagtatgctgtgtccttaaaacgggaaaaggtttttataggttcttgagagtatcggccataaatgtggatctgtaagataaaaagcagtatttcactagatggcccaagcccagtagtaaatcctataacaagaacaaagatgatcactactgtacttactcttgaagaagctgtgactgcatagttatacggaggctgaggagaaaagtctactttggacacggcaccaaactccttaatctgaacaggagtcttaatgaaaaacaaaagagtattggcagagttaaaaaggcgagccatacttaagcatcacgctattttctatggatcatttccttttgatcttagtaccaattagtaggttgtattcacagagaaatatgaggaaaagaggaagaggaaagacataagaaagggtgaagcaaaaaccactctattgtccaacccccagactattcccttgacattacagaagtaaacacagttagagagtcacatcccattgtctcagcagctaactttactccaatgcccaccaagaaaaagaagagctaagcctacatcaatcaactatgattctaagttaataaaaagatgaacagaccatgtaaacagacctacatcttttttgcacccactaacccattttagcaatctctgcatataagcaataaatttgccatccatttttataaagatacaccatccaccaacccatgtctaatggacatattttccaagaattccaatattacattacatatgttaataaacattttacatatcttaataaacgtttgaaagcatgctaggcttcaagctatgagtacaaagcaaaaatgatgtttttataaaatcctaacagttattgtcaattccctttctcaattttctttctcatttatgccaatatgacagaaaaaaaaagtatctaaactgttatcttatttggttttatgttctgtttttttcatcttatttatttgtactcatgtgtatgtgtgtatctgcttgcctaaaaatgcacatgtgtgaaacacatgctgaaggtagaaaaagatactagagcccctggaactggagttcaaggctgcccactgtgctgggaactaaacccaggtcctatgaaagagcagcaaatgctcttgatttcaagtagctaagactaccctcagcctccctgagtaacaaagaatgactctgaacttaccatctggcctccacctctcaagggctgagattacaggcatgtgccaccaaagaggtttgtgcaaggctggagactgaactcagggcttcgggcatgccagacaagcattctaccaactgagcgactccattttagtttgtgagtaacatttttattatctgattatatttcattttccacaaacaacctaattgcaaacgttttctagttttctaggttctcaatttaaaaaaaaaaaaattgcaagccttactagaaggtacagagaagctaatttcagagtaagaaaaagcaagaaagtcttcctgcatataagattcaagttttacagtttcacttgtcattgcacacatgttctgcattaaacatctgcatggttaaattaagtggtatggacttttacatgaagctctaagaaaaaactgataacaaattatccacctgaactattagttttagctaacagttctgctagcataagatggagaattaagataaatggataaagaaatgtccaaattctttcttccctcatttcctcttgtactttaccttataattgttccagtacagagtgtcttgggtgattttttcaccaagtacaggatatgtctgaatcgctacaggtttataaccagccatgatttcatatagttacactgctgtcccagggtcaataatctggaactgatgtcagggaactgcagtgactctgccttatacctaaaaaataaaaaagaaaagaaaagaaaaaagcacatattatgtatacactttcacatacaagtatgattttcattctactttctttcaaaaggctgtgtggaacttcaccgattagtgaccaacaaaccatttcattggaaccctagaagaaacactggaagaatacagcatctgcagcatctgtacatactagctgtatatgtatgttctcaaatctccaagaccagtctgtaacacttgaaaataaacatgactcagcctcccaacagtccaactagaaaagcatgcaggcctagaatgcttgttttcttgacaaaggaaataacatagaactcaaaatatcaagttatctctacatatttggcttcctaaagaaaaagataccaagaagaaaggaaaacaaagctaatattttagtgtagaagcttatgatgaaattagagataatgttctgacataagacaaaaggtttaaactgtaggctagaaaaccaaaatagagcaaacttaaaatggcagaataagatttaaaaaatgtgggggagaaggaatgggggtgaggggagggagagggagaggggaattacatgtgaaacaagcctgttccctaacttgtattaataataataataataataataataataataataataataagagaaaaaaaagatttaaaaaatgaattaaagctcttaacatgcaatgaaaccaacatcttcggagaagcattcaactgaagacagtctattttatggatgaatggttccagtgatacaactctccatccatttgagagggctgcaaagatgacatcagtaacaccggaacaaatagcatgccatgttctgactaacgcaaagcaaaccaagattcaagagagaaacttttctattcagtcaaacacctccaatgtgcaagatagtattcaaggcactgggaatccaaggacaataaacagacatgatctataccttcaatgattgggcctattaggaatctagacttagcttcatcctcattcctaaaactctgaagaagtatcacgtatcactgccctctgatagagacactagcaatcaagatttcaactctcaaagatttctttgtgtgcaaaagtgtgtgtataaagccagagagtctttctctatagtgctgcaccttatttctgagacaggatgatatctctcattgaacataaaactcaccaactgacaacactgcctaattagcaagcctgactaacaagcctgggggaatcttcctgtccctgccacccagcactgggattttaggcatactccaagctctcctttttacctaggtgctcaggatttgaccccactatattcactaagacatctccccagcccttaatctctcaaatatttctaaacctcaaatttacttaaccctagttcaattgcactaacttttgtctttttgacaactgaaataaaagcaacaccattcaaaagtctcctggactcccgaatccatcttccaaatagtagtgtggctacaaaactgaatactgcccagaaaatgaagccctagatccttagcatgtaaggttccctttgctctgcccctttaagcttcacctcttgctgttactgtttacagttcactaaactcagcacactcattcattcttgcttcaacatgtgctctctaccaggaaggtcctttatctgtttaaggtcattgcaggaaatcagactgtccttcagaaatccctctctgccttctgagactgggtgctctctcctatgatccaatttgtctctatttctgtaagtgtgcataatctcgctgcattgtagtgacctttttccagttaaatagaacaacatattggaagtatttgtttgtaaaaatgctcaaacaatgatctttttaaaagggggagcatcatgaaaattcctattggaaaaacataaaatcaaaagcattagtggtttataataagaacaatgctatacagcaggtgttcaatcaagggccagccagatggtaaatgttttaggcttggccaaacaacaggcaaaataggagatattctataattaatgacataggaaaaattcacaatttttacaggaggcttccctaacaatcataaacacaatctttgttgttgtttgtgaaagagagtagaattctctgaggtcaagggctacttcacttaattccaagccaatcactgtacatataagacagtatgtttatctgttaaaaaaaaaaacttagctcattaaatatacaaaaacagacatcagaatagattcaaggatgggtagctcctaaatctatttttcaagaaataaaaccatttggaggaaagaagtgaatagtagctgtgacaaaatgaagataggcattggtgtcccgtatgagggaagacagtgcaaatagcgagttgctatgaaaacgaatgaaagaaaactggaccaaagtcagggcccaagaaactggggtttactgaataacaggcattactacaaggtgtgatcaaataaactctgtagttagagtactgagaacatgcaagaggaagatgtttaattctacctggaaaaggttttccatttcatcagcgtctgtgagcatgacatgacacgatgagcacaaaaggagtaaacgcagagtgagacgaatacccggccattctcaaatcaccaggacagaaatctgtccttggctttggagaaaagcaggttactctggggactgacatcggtggctaggagagcgactacagaggagcaaagcctgggtcgaattaaatcgcaaggatcctcagaggcaggtaagttcaatgatctgcggagcctgggaagggccagagcagcatgtccagcatgtcagagatcagagtgaggcctgagcagagcctgggccgccaccgggagccaccatcgcctacctctgcggggccccgagggtccgccgaggcaccccgatccccaggacgactccccagacttcgccagctcgctacagcaaatgtctcagaagcacttgctcaaactcacgcggacactccaggagccggaaatgcagaggcgccggagcgcggcgcggacggatgacgtaatggcgcatgtgcagaagcaaccaagaactacaagcgagccccggtgggtggagcagtcggggaggggctcggcctttctctggtgatccggaaccgaggtgacccttagttctctgagagcatgggctgcggaccgcgaggggaaccaggagaaatccctggaagtcgtctcgccttcgctgaatgctctgggcttttttcagaggaggaaaaatataggaagtgacgtctgggtccgaagcaggccgggcttgaggacttgtagcgatccgcagctggccctggccgggccggagcctcccctgcggtctgggttgtcgagtcacccgctggacggtcccctgtcccggggtccgctcgccgctcgagagcgagttcagcctgcggcgggaacgcccgccgggacacctgtcgcttgtgagacgtttttctttctttcttccttctttctttcctttctttcattctttctttcttcctttcttgtcttctctttttcttttttcttttttaaataacaactttttcgtctcgtaggacaatttcaagagtttggaagaacgggatgcctctgatatttgcttcccctgggtcggtgtccactgcccgcatttaagactctatctaaccttgcctgagctctggcaagtgagcctacctactgtctatgttaaccctttctgatcacctgttattcattcattttttttcctctcctgcacatcaccttttggcaaatgtacatctttgcttctccttggagcctacataagggttccttccatatttgctgatctcccttcaaagactggcaattccgtatattgaaaccttgacttgttctataggagctgcaaagaacattagagatgactatttctacatcattttataaacgattgagtctcgggaaatgtatacaatttgtgtgatcaacacaaattctattgttgagaatggaaaaccacatccaactaaaaaatgtgagaaacaaaatgttaaaaattgttgaaattaaggtcagaaaatatctatggagcaccagataggttttgtgtgttgtgactcccctgagtagttttagccaggtgtggtggcgcacgcctttaatccctttaatcccggcactcctgaggcagaggcaggtttcacacagtgtttccctaggccagccagctctacataatagtgagcttgactataaagtcagaccttgtctcaaaaaataaaaataaaaaagtggtctctatctgccagttttcccccttaatgggagtttgaaaggaagctgtcaagagaataccaagtgttaaaagaaacacatgacatccccccagggagccggagttgctctcagcccactgaccctagaaaaaaatggtacttcatgctgtgtctttttaaagacccagtcttctctccacgcctccatctttcattgagtctctgaactaactttctgttcttgttgccttctgacaaaatgtagcgactttgctatgggatactttttctgactatagtctgtcttcatctctccccggaagttttggactctttctattgctgtttacttactgaccacagtgatagagttggtagagcaaggtgtgtctaccgggaatcaggagctttttcttgagttgaaaaaaattacctgcctgttctactgagaagattgtaataaggatcaatatttttttgtgttttggttttttcgagacaaggtttttctgtattgctttggaggttgtcctagaactagaacttgctctgtagaccaggctggccttgaactcacaaagatctgcctgcctctgcctcccgagtgctgggattaaaggcttgagccaccaatgcccaacgggctcatatcaatcttttttttaaggattttttttttgggggggagggtaggttcaggacatggtttctctttgtatcccttggctgtcctagaactcaatctatagaccaggctggccttgaactcagagatccacctgcctctgcctcccttcactatctgacttattttgtctcttttaaggattttagggtctctcgattatgtagctctgactgtcctagaactttccatgtagaccaggctggcttcgaactcaagagattcacctacctctgcctcccaagtgctgagattaaaggtgtgtgtcatcacacctggcttgtgtaaggttttcgtatgtatgttttcagggctgttctacctattacataaccagtaggtattctcgtctctggggaagactgtttctcctgctgtatagtagtgcctccaccatgcccagcgggatcaatcttttgaaatgattttaaaattaaaacactgaacagtggttatgtggtcaattcatttttcccttgattccaagtcattctgatcattgcacacttagtaccctttcagaatgtccaaggtacagtatgctgtcacatgacaaaaattaattggatgttcatttcttcccattttaagggattatgtatttgggactgtcatatatcctgtgataccgatccataatctccatattttatttttcattaaaacttacatccagcccggcattggtggcacacgcctttaatcccagcactcgggaggcagaggcaggcagatctctgtgagttcagggccagcctggtctcagagtgagtgccaggataggctccaaagctacgtagagaaaccctgtctcgaaaaaacaaacaaaacaaaacaaaacaaaacaaaaaaccttacatccagccaggcagtggtggctcaagactttaatcccaacactcgggaggcagaggcaggtggatctattagagttaaaggccagcctggtctatagagcgagtgccaggacagcctccaaagccacagagaaactctgtctcgaaaaacaaaaaaaaaaaaaaaacaaccttacatccagttgtttatgcttactctgaacaaaagatgacagatatactttcgattcttcaacagtagattttgtaggtgcagagagatgactcaatgggtaaaggcacttgctgccaaagctgatgacttgagttcagtccctgagacattcatgaaggaagggagaaccacttcctgaaatgtgtcctctgacacatgatatgcctgctgtggcccatgtgttcccacacacatgcaaacaaaatgcaaagtaataactactttttaaaataagttttgcaaagtgcttcactgtctcaatcgtgtattatagagaatagtgctaatcaacttggctacaagttggttatatctcagttcaaactgggagcccacttacaggaacagcatttttaaaaaatgaatctcaaattatagcttactgttttaatatgagcctggtccttaaacatttgccaatagtcagatatcggaaagagtagaaactaactaaaatgtgttgaaacatagtgatggaggtgtactgtatttccttcatccttttccaggatgatggtggtatctctttttacaaatgatactcaaggtcattaactcatgcacatcacatagctaataaatgagaaagcttgagttcatgggcaggttacctacctctgagtattgtgtatctcctattatggacagaatcttacaagagcactgtttggatttgtggttgaaagtaattgtgtgtatacatttacataagttataatatgctgctttaaattttccaaatctttcctttcagatactttaatatcccaattccaagcatacactggaaaacacccttgcaaaaccaagaggaaaccgtgaagaaatgttttaattattgaaaccatggctacatcagcaaatctggacattggggcccagctgattgtggaagagtgtcccagcagctatagtctctctgacatgccagacatcaaaatagagcaccagctggacccaaactcagaagaagggtcagcgcagggtgttgccatgggaatgaaattcatattgccaaaccgatttgatatgaacgtatgttctcggtttgtgaagtccttaaatgaagaggatagtaaaaatattcaagatcaagttaactctgacctggaggtggcatctgtcttatttaaaggttgaaagttatggtataactccctacaattgctttcatttgccctatttcattctgttttcctctgccatgaaatcagagttgaggaaaagcatgaagttcttttaggaagatttttctaggatctcacagaagccaacattaaatttctattaattttgaaaaatattcctttctaagctggtgtagtgatgcatgcctttagttaatcccagcacttgataggcaaaggcaggtgagttgagagccagcctaatctgctctcactagttcagtccatccagggatacatagtgagaccctgtccaacaaataaaatccttgcctaatctttatttacaatttctttaatttggttattcttagttgtattttgttttgtttttgtttttttgagacagggtttctctgtgaacccctgggtgccttagaactagctctatagactaggctggcctcaaacagagatccacctgcctctgcctcccaaattcttcaattaaaggcttgcaccaccatcgcctggcctagttacatctttttaaataatagaaaaatattcctttttcaaaattagtttaatattttctatttcatgactaatttacatcttaatttacattttaatccagtgatctgtcagcatgctttaaagttactttgtaatctattaatattaaaactagtcaataaaatttttcaaaattaatagttttctttgtagaacttatactgtagtagtatagactcatacagaattactatcaactgatgaacacttgaattgaaactgttaagcctcatacatttttttcatgtgaacattgacacttttattagaatgctttgtccttaaaatactattttaatttgttttatttagctgagtgcaatatccatacatctccttctcctgggattcaagtaaggcatgtctacaccccctctacaacaaaacatttctcccccataaaacagtcaactactttaaccaacaagcacaggggaaatgaggtctctaccacacctctgttagcaaattgtaagtatgcgctaagaatgtactgaaacattactactagtgtaattaactaatgcaattacaaattaggaattgggctttgaaatattagtatccctaaataaacattccagtttggaaagcttaagtgatatatttatcactttaataaattgaaactttttcatgtgtttttatgtttcaccgtttcctgttatatctctctgagaacaaatacagtttaaaatattattaaaacctttatagttttaccataaaaaagtgagttactgtgaattatttgcaaattaagatatcaatgtttttgtgttcttgggagttttgtatttagtggatatgggcacatatttattgtaaatatgtccttatgtattatttcactaagaaatagtttgtactaaaagctaaataatttttactgaaatgtttcattagcatataaatataatgacttggaatgtaaagtcattatataggatataaagtttctctaagctaaccgatattgggtgaggcatgagtatttgaatgagagaaaacccagctaacagctagatgataataactacatttggtaccataatgtgagtgtgtctgtattctggtgagtatcttgatctttactttggaaatcttaaatccctccagatgtcacagttgcatactatagcagttgagccaggaagaatcttttagcattctaattccacctatgggccatttctagtttaggtaaatgtgtgtatgcttcacagttgcttttctgtattgagactacccagtcatatcactaaaggcagtattatttaaaggtgcttctcaaaaccattgtcttacaatattctaactgtagaacttctctactgaaaaaaataaaataaaaagctaaagactgtcccccctggcatgaataaaaaattataatcagttagtcagaattaacatgctaactagcctcaattaaacctctactcataaatttactttcaccaaccatggtggtcacacctataatcccaaaactcatgagactgaggtaggacaatcagaagtttaaagctatccaggctacataatgagactgtctttaaaattaaacttaccccctcaaaaaaaaaaaatctcacacagctagttttctacttatgaactcattcctaattttaagaaaacccatccaattccaaaataaaaatattcaggaggctgaagagatggctgagcagttaagagcactgactgctctttcaggggtcataggttagattgccaccacttacttggctgtcaacccccagtaactccagatgcctcaatgggcactgcaggccaaatacccacttgcataaatttaaaaatacatgtacctaattagcatttaaaaggctgggaatggtgatatatccctgtggtttcacctgtttagaaggttgaggtaggaggattgtttgagcctacatgctcagcttgggctcagcagcatggtgagaccctctctcgggaaaagaagttagctcttcagtggaatcactaagaaaactaaaaggaatgtctttttggccttcctcgtaagtttggatacagaagtagcatgttaaacattaagtacataaatcactctttaggataaattttgccccaaaaaatgataatttgcagatgtcatattaccatatgagtcagttctcagagaacactatctgaggataccaggatacttcccttcattaggcttacatgatgagttggtgggttttgttttggaaaagaaactggcttcaccctgagacaatagctgtgtacctacaagatgcacttgaagaattttaacattatattgtttcagctttgtctgttcaccagttggcagctcaaggagaaatgctctacctggctactcgtattgaacaaggtaatagcctagttttaagtactatattttaaatattcatttgaatttattaggtttgttatctgttttattttcatataggagactataaagacaaaataagttgtataatcttgccaagcacataagccaatggatagcaaaaagggaaattttaagtaacaaagtataaaatttgggactttagggtggctctgagattaagagcactagctcttcttccagaggtcccatgtttagttcccagcacccatatggcagctcactaccatctgtaacgccaggtgtagggtatttgatgccctctttctagcctccaagggtaccaggtacatatgtagtatacatatatacatacaaggcacaacaaccatacaaataaaatcacttgattttaaaaagaagttttagcttccttttccccaaaacaaacattgtaagttttttgtatttctagaaatcatttccatttatggttacatttgagaatatgtatgtgcttttgttaggtatacaagcaagaaaatgttacatatactgcaacatgtcttttttcatttaatattggaattgttctactaattggagagtgttctactaaactttttttttaatgtgtgtgtgtgttttgcctgtatgtgtatatgtaacacttgcatgcctgggacctgtgaggttaaaagaggatccctaagaactggagttaggatggtgccagccatcctgtgcgttctgggaacctgggtcctctgcaagaacattgaagtgctcttaactgccgagccatttctccagccataagatctttttcttgagaaagagtctcactatgttgcccaggttgacctcaatctcacagtcctccagtctccgccttctgagttctgggatcacaaacatgtatctctacacccagccattttatcctgttttactataatgtgtatgtattactatgatttttatttgttcttttaacaattcacctggctgattacaaatgtttgctggcaatcctagcataaattctttataaatatatacattgagtaaattttcatacatagtatgccaggtcataaactaaatgatttttgtcgtgccgtgggttgaatcagctcttcacatgggctagaacagtgctctgccccagagccacacctctgactctgcctccgccttcttgttgttacattttaactggatgtttgtcctcacattagccttagagttgcagtttccccaaactgtcacatatgaagtgagacttcagttcttaataatctttggggaaaagtggtgcctcacaggaattccactgatacatttaggttataatgcctttgagtttctttttgtctgaactacctacggtatatttgtatatttgtatcgtataaacttcaaagtggaagaaactgacttctgttgttttgtgcatatagttttccccaatttgtccattttgtatgacctcttcagatttttaattgtaaatttttcttctttttgactttggaagttcgtggcctactttgaagattccccactctaggattataaagaaaccactgatttttacgctggaacttgtctggtttccttttttatcatctttgatgtataagaaaactgccaggtggtggtggtggcagacacctttaatcccagcacttgggaggcagagaggcaggcggatctctgtgaattcaaggccagcttggtctccagagtgagtgccaggacagccatggctatgtagagaaaccccctgtctggaaaaaccatcattgttgattacagggagcatgatccaagaattttattttcataagacttagatgtatttctgtttatacttaactatcgggggctggagggatgattccaaacctaagagctggtactgtcttgcagaggacctcagttccatttccagcacccacatcaagtggtttacactgacctgtaactccagggagatctgaagctgctggttttcacaagcacctgtactcacatgcacccacaccccacccccacacttacatagttaaaaaataaaaataaatatttaaaagtagaaatttcatgttcaaaaaaatctgaaaaaaaatttcatgttcaacctactaaagtgtacagggaaagctgtgcagtttataactattaggctacattcagggaataaatgaggttaaaggtgaaataatgtgttacactaaagatgatcgaatctccatattatgctggcaactgtacggatgaaggaaaatcacaggcagcaaggctagctagagtggaaggtagctttcgaaagctgttgaagttttaagtatacatttaggtaatgctaagggctatcatgtatcattttattgtgatcttcccaggtatgtgttgagataagcaagctattaatctgtgtttagcagaaattaagtcacttgcccagaaccaaaccactagaaaatgaaagagccaggattctatcttgggtttcctgtccctgagaccaaagttgacaatcttgtacctaacacgatactatactgtgtgtggtagtttatactttacagagtgtgttccatgaacccagcttttttatattgaggcacattttcacatgtccatactgaaaatcacaacacattcagatttcaataatcaaaagtcatctcattgaacttcattgagtttttacaatgccggtggtttcaaagtgatattaatatgtggttttaaattagatcacaaaaattgcttttcttttaaatagaaaatgttatcaatcacacggatgaagaaggatttactcccctgatgtgggctgcggcacatgggcaaatagctgtggtagagttcctacttcagaatgtaagaaaaatgctcagaaaatatgtatgtgtagtttctggagctcagttaagtctttagtgcagtatttatatctgcagccaagcagacataaaggtggagggtacactgccttggttcttgtggaacctgggtctagctgggaaagcagtggtagccatatatgaaacagtgagaagaactgaatgtctagcccctctgagtagagcaggaacagaagtgctgttcacaggtcctggagggaaaggctcctggggtgggggtcggggggtgaggcttttcagagggaaggagactaagtaatgaggcagctggagagagggaggcaaggaggcaggcatccaggcagtttgggttacaagcaccatctatcacttttctgttatttcctcattaatcctagaatgtggcccagcctcagtgttaaactgtagtcgtattgacaaagacaagtgttcttgtttaaattaattggaagtcctctgtgttcacttcccatgacagggtgcagatccccagcttttaggaaaaggtcgagaaagtgcgctgtcattagcctgtagtaaaggctacacggatattgtcaaaatgctgcttgactgtggagttgatgtaaatgagtatgactgggtgagttcacacgttgaattgaaaactgctgtaacaagcctgtacctccattgttaaagtgccagcttagcacgcaagggcccagtgttcaaaccctagagataggaagataaagattatctttggctggcttcatggctatttcaaagccacaggactacttgaaaccttgcctcaaaaataaataaataaaataaattattgtaatattttttggattgaattgatttcagggagacataagctttattaaggacttggaagaaaaaatgtacttacttaagatgagcaacttaatgtcataaattcaattattgcttgtgacttatatttttcacaaagtattaatattattttaaactacttctacatgcccagtgccattgcagcatttgattgactgttgctcagtgagaaatgctgatgaccttttcctcctgcagaacggagggacacctttgctttatgccgtccatgggaatcacgtgaagtgtgtaaagatgctgctaggtaagcaggtgaatacagtcattattcagaagccctgggagcattttatttgcaatgtccctgttcggacaagcttacctagtgctcggatgtattaccctgcggcgtttgctcctgggtttcctttaccacggggctgccctgagagaggcagctccatcatactgcacactgcacttgaagattttgcccttcctgctcacatctggggtcacctttgactccagtctggtgttctccatgcacagtttctttgagtataagttgtttatgagcttcaactactctagagacgtttaggtaccttctccagccaccagatgaactctgtatcccatgcgctcaggactttgtatgagcatgttgcaaatagcctccgcattggctgaaatctgttcaaccatttgcatatgagccacgaatagacagacatttgcattttcatcttatttatatagatttttctgttttgatacagaaaacggagctgacccaacaattgaaacagattctggatacaattctatggatttagctgtagctttgggctatagaagtggtgagtattttagagctctcaggtttcattttaggaagactttatatatagtaattgccagtgatccaaacctttttcatcacttcatgggtaaaacattatattatcctaactctggccatatgctttaacggagtgcaaagtaaacagatgtctatagagttaagaaatgaattaacttattgttctttttcataagctgaaataatagttactggaggaaaagtgggcagtatttgcaaggttttcaaaaatggtactttggagtcttcacttttaaaaaaaaaaaaaaaagtggtaaaacctcagtagagaaaacacagaagctcaggcagctgctgaattaggaactacataacagtcctacttagaaatagcagaaatagcttcattttacaaaatacccaggctaagttgaatttatagagcagcagccttttgtttgcttgactttgctttgtttctgtgctgtgaccttggtggcctgtctttgcagttcaacaggtcattgagtcacatctcctgaagctgcttcaaaacatcaaggagtgatgcaacccttagaaaatgccagctgcccttctcttcacttcttggtccttataaatgataattctgtttacgtgtaaatttttacctcagttgcaatatttgctggtttttagtgagttttaataaatattcctctgaataattcactggtttataataaagttaatcctgatttttattttaaaataatttttaaacaaatgtgtttactatatatttaaagttataaattaatgttttatggcatgtaaatttttatggtacaggtggttatgtgtctttgtattaagtaccaaaatttgacactttgagaaattccaccctgtttatcttcactcttgtattaactctctgactttgcacagggcttactgtaagtctatgggagaaaaaaataatgttcttgttgaattaaaaagtatacagtatgatggtttacaaaatcatgtttaaataaaatacttctgctgtctgtgcattctagctctttgattatgtttagcaagattttcagtttatcatttatgttctacaaatcaatcaacaaagtacctttagaacattgttctcttataaattggtttgagaaggaaaagtcattatgaaatacattatgaaataatgtatatgaaattaatcaaatacattatgaaagagatgtgaggatgctctttaaccctactggaggaaaaccattaacttgccttttactaaaatctagaagagggagccacgaactgtaaagtgatttgactgactgtgagacttgattgagttaaatcccttcctctgcaaagtagatattatatcagttgtaacccacatgaattgatctgtatagtataaacaaaagagagctaagtgggactgaaaagatgccttggcagttaaaagcactggtcacttttgcagaggactgggatttggttcccagcacctacatggcagctcacaaatcgttaactccagtttcagggggatccagcactctatgtgtataaccattgcatgcatgtggtgcccatacaaatatgcaggcaaatattcattcacataaaattttttaaagttatgttacaggtaatattaggtacaattgctgagttatatgcaaatcttgtccatatacttacactttggggcgggggggtctctgcagtcactctggccagcagaccaacagtctgcaagaggtgtgaaagttcagttcaacatgactaagtagccactgttggttcaaactgagagtctgacaccaagtagactattttagggacattgaagcatagcacaatttgttctggataagtacacagaactgaagttccctttgtcctttcatcggggcctctgagaaagtcttcgattggtctggctccccacttaaaagcctcgtgttttcccacagatccagagctttccatgacttaagaatgaaggtcaaaatgagtttctgctcagcagtctttggaacaaactgcagggcttctgaagcctgaattattgttcttctgttctaggttagggccctaagcccaagaagttcttcccacatcttaccaccatatcagctaatcagcgtaaattcctcttttctttaaggtctgcacaatgtgctaagagatctctgccttcttttctttttattttatttatttggaaagataggagcatgtgctcacaagaatgcacatataccatggcacacattgaaaggtcaggggacaatttacaggagccagttctctcctcccaccatgtgagttccaggattgaactcaggttgctgggcttgacagcaaacactattacctgctatggagtgtaacagctgttcaagagatgatgtccaggagtctgtcactgataccatcagtgatgggatctgggacacccttctacagggctttctataaggctctgcaagttagaggttctgggattaaaagaaccttcaggtgtgcttccagtaaaggcagaacaatctaagacaggacagttaaaagccagttttgtagcactctgtggttatttcatgagcaatttgccagtgcctcttctgagggtaagaacctatttcaggtagcaagggtgttaatgaaacttggaggatttttccacaaaaatgcatgctatctggaatgtttacactcacagcatttcactgttgggaaggctaagcatcacttctaagcagttattcctcccatttccactacaagccagtcagaatcatgttcttttaatatcagagacattataatcagatgtgttgctatgttttagagttaagaaatactttatacttcagtgacagataaagacatgtctcagttccagacatagatgcacagagagccatatggaagaaagcaaacaaaacaaaacaaaacaaaaaacccaaagaactctctatctccctctctctcttcctgcttatttatttatttatttgttagggatggaacgcagggctttgctcagcctttttgagcattttttttttcaaattgtttccttttgttttaaataaaattgtgtttcatgtcacaaacacttggccctagccctgggttacataacactaggctaatggtggaagaaagtgaacagtggcttcaggcaaacggaattagaatcaactacacaagagacaaagacagtgatttttgacacagtgtgtgggattctttatctttcctctctttttctctagagcatgggattcttgactgacttgaggctacatatagacaaacagaccaaaccagactacacaaaaccaaagtcactagtaagtgggatttctgtcacctgctactgaggacagatgttatacacagcttctgttatgctatgtataacagatgtatatctctgttatacatccagcagggatcaccaacagcagaccacaaaggctaacccccaggctggagagatggctcagggattaacagtttatgagaactggcattcagagttcaaagactggcatccatgcaacaagcctataatcccagctagaaaggaggccgagactggagaatgactggggcttgctggcttccagcctagcccagacaacacgagcccaaggttcagggagattcccctgcctcagccagacagaagatgagaaaggaggacacctggcactctctttaggcctccatgcaagcacacaggcatggacagtcctctcccacacctcataaatgtgtacatatactcacacagatacaaacatacatgaataaactaataataaaaaataatttctaaaaagctaataatccccttcacttagccatcaatagataatattttcataaatgtgtgcaaagttgaaagaaaaacaaatacataaactctgaagatggtagcaagacctggaatcagaaaagctaaatttctgttgctccctggactatccttcaaggtcaagggaacctgtgcaagtaagtaagcccatgtggccccaacatttaatactttcaaacaccagcaagtgacctttaaactgttcccagatcattttcaaaagactacaaagacaggacaccttcatacaactaagcctgtgacaaatactttaatcttttcatgaataacggaagaagtcagggagaagctaaactagctgaacattatgacatacccctttagttctatcactcaggaggcagaagcagatcgctgagtctgaggccagcctcgtctacacagtgagttccaggaaagccagggctacacagagagatcctttctcaaaaaaaaaaaaaaaaagttaaaactggccctgactccatataagatgctggggaactgggctgaccttgagataagattgctggtcatatataaacctagctaatgagcaacaggaacctacactgcatcgaatggctcattcccacagtctagaacttgttttgttttacagataaaaatctccaaagtggggcaggagagacagcttttctgattctcagtacccacacagtggctggtaaccatctgcactccagctccagggcattctacgccttcttccagcctccaatagcaccaggcatgcaaatgctacacagataacatgcagcaaaacccccatacatgtaagagttcttaacaatttaaaacctatgaagcaacctgtaatttcactcagtctgtggcctttaacaaacagtgactatttaatcagattctgtttctccagataatcctctgggggactttgtcccatatgacattgaaagaacatgtcaccatgacctgttaagacttcagggaaagcatggctggggttaaggaaatcaccctggtgattaatctcccttctttcatcagctgatggtaaacgaatacaggtgccctgaagtgttggtgacaacgcttgtcttacatcaccctgcttatatgagacggcatagtgggtccaggagtcacctcagggaaagaagtggaaaactggagatctgcaggaaaaaaggttaaggttttaatatgcttgatcattataaaaataaatgcctgggcgtttaaggaaaatagtagtggatggattttctgagtttgtcactctgaaattttctttggaatgtcagcctcctgtatgggtaagattttattgcaatactttttaacacttttaattctgttcttagcacaaagtgttcatatattcttatactattgatagatgatagatagatagatagatagatgatagatagatgataggtgatacacacatacatgcataagatagatgctttgtcaggttataccatttaccatttataatccagttggggcaaggaatctactcttagatcttaaaagatttgctgtgtgaaaactaaaatgtttgcaaatctgatagcttgaaagaattgctacacaaactctggctattgtaaacccataagtattctttttcatcttttttttttttgtgtgtgtgtgtatgtgtgtgtggcaagactcctcaaattacttgcctaatgacagtctcataagtttgccttctcactcgtaaaattccaaattgtagctataccttcttgtatttttaaaaataatttatttatttttattttatgttctttggtgttttgcctacatatgtgtctgtgggagggggtcaaatcccctagaactggagttacagacagctgtgaactgtcatgtgggtgctgggaattgaacctgggtcctctagaagaacagtcagtgcacttaacactgagccatctttccagccccaacattttttatattttgttgctaataaatttttaaaatgtatgtgtatttgtttcataacagaaagtaacaatagccaggtctgtaacctcaactccttggaaggttgaggcaggaaaattgcaagtataagccttcctgggctgcagtatgaattcaagaccagtcagacaacttagtgagattctgtcccaaaagagagagaaaaatatgactgtgtttatagctaggtggtgggatccttgtctggcatatgtaaggcctctacatgcactagcatgtccatggtgcacatacatacatgcaaggcacatatatatgtataaaatataaagtaaaatttaaggaataacttttttgaaaaataacataggaggctggagagatggctcagcagttaagagcactagctgttcttccagaggtcatgagtttaattcccagcaaccacatggtggttcacagccactacagtgggatctgatgctctcacttggtatgcagtcatacatgaagacagagcatgcataaaataaataaataaatctttaaaaaacataatacaggcactagagagagaactcagaggttaagaccaattgttgctctgacagaagacctgggttccattcccagaacccacatggtggctcacaatggtctataaatccagtcccaggggagcaaatgccttctgccctccaagggcaccaggcacgtatgtgaggcacacatatatgtgcagacaaaacactcatacacataaaataataagagaagataaatctaaaaaattacttaacatttatcatgttattgaatccataacagaaatcaagaaatgttttcctacctaggcagtggttgagtacacctttaatcccagcacttgggaggcagaggcagaggcagagaggtctctgtgagttcgaggccagcctggtctacaaagtgagttccaggacaaccagagctattacctagagaaaccctgtctcgaaagaaagaaagaaagaaagaaagaaagaaagaaagaaagaaagaaagaaatgcttcactattggtgcttctatggtcttttgatttgagagggtcagaagtgtgactattactctgggaacagttacaattcatttcctgctgaattctctcaataaaatgagacctctatacatacaggtctggattcacagatgcacttgactactagaaataaccaaaataaccaagattgcctctgtattgaacatctgcagactttttcgcatctcattattccctgtgaaggaaccggcttcccttttggcagccataacagccgaacatgtgcttgccatatacctgccttggtcacttagaggtcagatgcctgtctcgtgacaaggaaccttagtcacttagaggtcagatgcctgtctcgtgacaaggaaccttagtcacttagaggtcagatgcctgtctcgtgacaaggaaccttagtcacttagaggtcagatgcctgtctcgtgacaaggaaccttagtcacttagaggtcagatgcctgtctcgtgacaaggaaccttagtcacttagaggtcagatgcctgtcttgtgacaaggaaccaatcagaagttagctggtnnnnnnnnnnnnnnnnnnnnnnnnnnnnnnnnnnnnnnnnnnnnnnnnnnnnnnnnnnnnnnnnnnnnnnnnnnnnnnnnnnnnnnnnnnnnnnnnnnnnnnnnnnnnnnnnnnnnnnnnnnnnnnnnnnnnnnnnnnnnnnnnnnnnnnnnnnnnnnnnnnnnnnnnnnnnnnnnnnnnnnnnnnnnnnnnnnnnnnnnnnnnnnnnnnnnnnnnnnnnnnnnnnnnnnnnnnnnnnnnnnnnnnnnnnnnnnnnnnnnnnnnnnnnnnnnnnnnnnnnnnnnnnnnnnnnnnnnnnnnnnnnnnnnnnnnnnnnnnnnnnnnnnnnnnnnnnnnnnnnnnnnnnnnnnnnnnnnnnnnnnnnnnnnnnnnnnnnnnnnnnnnnnnnnnnnnnnnnnnnnnnnnnnnnnnnnnnnnnnnnnnnnnnnnnnnnnnnnnnnnnnnnnnnnnnnnnnnnnnnnnnnnnnnnnnnnnnnnnnnnnnnnnnnnnnnnnnnnnnnnnnnnnnnnnnnnnnnnnnnnnnnnnnnnnnnnnnnnnnnnnnnnnnnnnnnnnnnnnnnnnnnnnnnnnnnnnnnnnnnnnnnnnnnnnnnnnnnnnnnnnnnnnnnnnnnnnnnnnnnnnnnnnnnnnnnnnnnnnnnnnnnnnnnnnnnnnnnnnnnnnnnnnnnnnnnnnnnnnnnnnnnnnnnnnnnnnnnnnnnnnnnnnnnnnnnnnnnnnnnnnnnnnnnnnnnnnnnnnnnnnnnnnnnnnnnnnnnnnnnnnnnnnnnnnnnnnnnnnnnnnnnnnnnnnnnnnnnnnnnnnnnnnnnnnnnnnnnnnnnnnnnnnnnnnnnnnnnnnnnnnnnnnnnnnnnnnnnnnnnnnnnnnnnnnnnnnnnnnnnnnnnnnnnnnnnnnnnnnnnnnnnnnnnnnnnnnnnnnnnnnnnnnnnnnnnnnnnnnnnnnnnnnnnnnnnnnnnnnnnnnnnnnnnnnnnnnnnnnnnnnnnnnnnnnnnnnnnnnnnnnnnnnnnnnnnnnnnnnnnnnnnnnnnnnnnnnnnnnnnnnnnnnnnnnnnnnnnnnnnnnnnnnnnnnnnnnnnnnnnnnnnnnnnnnnnnnnnnnnnnnnnnnnnnnnnnnnnnnnnnnnnnnnnnnnnnnnnnnnnnnnnnnnnnnnnnnnnnnnnnnnnnnnnnnnnnnnnnnnnnnnnnnnnnnnnnnnnnnnnnnnnnnnnnnnnnnnnnnnnnnnnnnnnnnnnnnnnnnnnnnnnnnnnnnnnnnnnnnnnnnnnnnnnnnnnnnnnnnnnnnnnnnnnnnnnnnnnnnnnnnnnnnnnnnnnnnnnnnnnnnnnnnnnnnnnnnnnnnnnnnnnnnnnnnnnnnnnnnnnnnnnnnnnnnnnnnnnnnnnnnnnnnnnnnnnnnnnnnnnnnnnnnnnnnnnnnnnnnnnnnnnnnnnnnnnnnnnnnnnnnnnnnnnnnnnnnnnnnnnnnnnnnnnnnnnnnnnnnnnnnnnnnnnnnnnnnnnnnnnnnnnnnnnnnnnnnnnnnnnnnnnnnnnnnnnnnnnnnnnnnnnnnnnnnnnnnnnnnnnnnnnnnnnnnnnnnnnnnnnnnnnnnnnnnnnnnnnnnnnnnnnnnnnnnnnnnnnnnnnnnnnnnnnnnnnnnnnnnnnnnnnnnnnnnnnnnnnnnnnnnnnnnnnnnnnnnnnnnnnnnnnnnnnnnnnnnnnnnnnnnnnnnnnnnnnnnnnnnnnnnnnnnnnnnnnnnnnnnnnnnnnnnnnnnnnnnnnnnnnnnnnnnnnnnnnnnnnnnnnnnnnnnnnnnnnnnnnnnnnnnnnnnnnnnnnnnnnnnnnnnnnnnnnnnnnnnnnnnnnnnnnnnnnnnnnnnnnnnnnnnnnnnnnnnnnnnnnnnnnnnnnnnnnnnnnnnnnnnnnnnnnnnnnnnnnnnnnnnnnnnnnnnnnnnnnnnnnnnnnnnnnnnnnnnnnnnnnnnnnnnnnnnnnnnnnnnnnnnnnnnnnnnnnnnnnnnnnnnnnnnnnnnnnnnnnnnnnnnnnnnnnnnnnnnnnnnnnnnnnnnnnnnnnnnnnnnnnnnnnnnnnnnnnnnnnnnnnnnnnnnnnnnnnnnnnnnnnnnnnnnnnnnnnnnnnnnnnnnnnnnnnnnnnnnnnnnnnnnnnnnnnnnnnnnnnnnnnnnnnnnnnnnnnnnnnnnnnnnnnnnnnnnnnnnnnnnnnnnnnnnnnnnnnnnnnnnnnnnnnnnnnnnnnnnnnnnnnnnnnnnnnnnnnnnnnnnnnnnnnnnnnnnnnnnnnnnnnnnnnnnnnnnnnnnnnnnnnnnnnnnnnnnnnnnnnnnnnnnnnnnnnnnnnnnnnnnnnnnnnnnnnnnnnnnnnnnnnnnnnnnnnnnnnnnnnnnnnnnnnnnnnnnnnnnnnnnnnnnnnnnnnnnnnnnnnnnnnnnnnnnnnnnnnnnnnnnnnnnnnnnnnnnnnnnnnnnnnnnnnnnnnnnnnnnnnnnnnnnnnnnnnnnnnnnnnnnnnnnnnnnnnnnnnnnnnnnnnnnnnnnnnnnnnnnnnnnnnnnnnnnnnnnnnnnnnnnnnnnnnnnnnnnnnnnnnnnnnnnnnnnnnnnnnnnnnnnnnnnnnnnnnnnnnnnnnnnnnnnnnnnnnnnnnnnnnnnnnnnnnnnnnnnnnnnnnnnnnnnnnnnnnnnnnnnnnnnnnnnnnnnnnnnnnnnnnnnnnnnnnnnnnnnnnnnnnnnnnnnnnnnnnnnnnnnnnnnnnnnnnnnnnnnnnnnnnnnnnnnnnnnnnnnnnnnnnnnnnnnnnnnnnnnnnnnnnnnnnnnnnnnnnnnnnnnnnnnnnnnnnnnnnnnnnnnnnnnnnnnnnnnnnnnnnnnnnnnnnnnnnnnnnnnnnnnnnnnnnnnnnnnnnnnnnnnnnnnnnnnnnnnnnnnnnnnnnnnnnnnnnnnnnnnnnnnnnnnnnnnnnnnnnnnnnnnnnnnnnnnnnnnnnnnnnnnnnnnnnnnnnnnnnnnnnnnnnnnnnnnnnnnnnnnnnnnnnnnnnnnnnnnnnnnnnnnnnnnnnnnnnnnnnnnnnnnnnnnnnnnnnnnnnnnnnnnnnnnnnnnnnnnnnnnnnnnnnnnnnnnnnnnnnnnnnnnnnnnnnnnnnnnnnnnnnnnnnnnnnnnnnnnnnnnnnnnnnnnnnnnnnnnnnnnnnnnnnnnnnnnnnnnnnnnnnnnnnnnnnnnnnnnnnnnnnnnnnnnnnnnnnnnnnnnnnnnnnnnnnnnnnnnnnnnnnnnnnnnnnnnnnnnnnnnnnnnnnnnnnnnnnnnnnnnnnnnnnnnnnnnnnnnnnnnnnnnnnnnnnnnnnnnnnnnnnnnnnnnnnnnnnnnnnnnnnnnnnnnnnnnnnnnnnnnnnnnnnnnnnnnnnnnnnnnnnnnnnnnnnnnnnnnnnnnnnnnnnnnnnnnnnnnnnnnnnnnnnnnnnnnnnnnnnnnnnnnnnnnnnnnnnnnnnnnnnnnnnnnnnnnnnnnnnnnnnnnnnnnnnnnnnnnnnnnnnnnnnnnnnnnnnnnnnnnnnnnnnnnnnnnnnnnnnnnnnnnnnnnnnnnnnnnnnnnnnnnnnnnnnnnnnnnnnnnnnnnnnnnnnnnnnnnnnnnnnnnnnnnnnnnnnnnnnnnnnnnnnnnnnnnnnnnnnnnnnnnnnnnnnnnnnnnnnnnnnnnnnnnnnnnnnnnnnnnnnnnnnnnnagacccgagctaacatggggttagttcgttaaattacaataaagcctcgtgcagtttgcagcaagctctcgaatccgcctggtgattggggtgaccgcgaacctggcctgagaccccggatacttgagttttcgggggtctaacacctgcaagcaactacttaaccatccttcacactgcattatctagagatgacgaagtagatgagaagacgtggataaattgtacatatatactggcacacattactttatggacttgagcatctgtccatttgggcgtcaactttaggaattactgggtccagtcccctgtggatgcacagggaggagtatgcatgaaacaacatggtatgtttagtctccaaaatggcagattcacttgagttactttatgggcacatagtatctgaaacaattagttattttgatattttccctcccccaagccagtggggacaggttctagcaagatatgttacatctcccagaatccacttgtgaaaaacctcataattatctttgtggtgttcagtccagctgttcatcatctcttccccataaagtattaggagattactctaaatgtcattaattcttcagcatgaattaccccatgctacagttaccaatacaactccctctccctgggacctacatgattccatctcccaggtgatctctcctgaaccatgcatcctaaaacatcatgttaatcgatgtcaggttcctcagataccagtttgtaccaaggaaagctaatgagcttccttcctgttttctgctctagaggttcctataacagaggagcggctttcactgaggcactggccttcgggattcatggcggctcacagggttcacccacaaagccaggtaactcctccaaggtgcactcccattacgaaatctcttcctgggatgttctggggtttccttgccacagagatgggcagtggtaataaagccaattgctggtgatcttggcttagtgagaacccagcttctgagcccctcagatgtttgagaaatggttgttaagaatttaacagcccacctacctggccaagtcagagtttagcatcctggccttttccagagaacaagccactctctctgccgttccaggtcctggaccacaacacttgtattcatgacaatcccaaatagaaacaacccaattagttttcaagattgtattttattttaattatgtgtctatctgtgtaagagtgtgtgcatgtgaatgcagatttctgaggagaccagaagaggtcacacgatcccctgaaactagagctacaggcaacagtgagccactcgatgtggttactgggaacccaattgcaatcatcagcaaaagcagcatgtgcccttaccactgaaccatgtctccagccctgaggaccacccactggttacctctcaggtctccagccctgaggacccccaccccattgttacctctcatgtctcctgccgtgacaaccactattggttacctctattggaggaatgggagtcacacaggaacatgagggcaccctcaatcttgccttgggtagtgattacatggaaatgtgttcaaggtcaatcacactgtgcacatcacattcttatgctttcctatagacatttaagataaaaatcttaaagtatatgtaaggagtcatccccatcacaactaaactcagatggctgatgtacttttgttgtagagttgcttctctgtggatagttctttctggtgtgctacagtggagtaagagctggaaagtattaaacagttgatgatactacctgtgtcaaaggcaaggaaatggccgggcagcctcactgtaaagtccacgtgttccagcctattctgtagcccgtatgtgtataatggctgtcactgtgtgaaggcttcatctctctttcaggtgacaggaatctcttttcttcatcctgctggagatgtaccttcagatcagcatcataaaagaggtgatgtttctacctttaaaaaaaaaaaaacaaaaacaaaaaactaggatcctctacaagagcaaccctgctgagccatcttcccagcctctaatgccagcctatatatatattttactttgttgaaatctcagctttcatatattctttttacttcacagaattctttctttagttggttttagtgttttgaggcaggctctcactagatagctcaggctggccttgaactcatggtcctctgtctctgcctcctgagtgctagggccatagacatgtgctacctcgctgacttgttttctaagaatgctctttgtgtgtgtggtgtcttcccgtctcctccccacacatcatcatctgtccccaggggagtgtttagtgattagttatttcacattttaccctgccacctgaattaactttcctcaggtcatcctcaaaagcatccatgtggactggagatagagcccagtcacagaccacggtgatagaatgcaggcagccctcagtttgattcctgggactgcatgtactgtacatggtggcacatgcttgaaaccccagcacttgggagacaggcagttcaaggccatcctcgaagaccttgactacacagtgaatttgagatcagcctgggctacatgagaccctgtctgggaaagcaagtacactgcatctgtgtgatggtttaagtgagatatccatctcccagagattcagatgtttcaatacttggttcccagttggtgacactgtttagcggggtttaggaggtatggaggtgtgtcactggggggtgaacattgaggtttctaagccatacaccaatcccagttttctctctgtggtttacgatgggagctctcagcttgcttcagccaccaggcctgtcttctgccacacttccctggcatgaccataatggaccgggaactcttgccttcgtcatgacactttatcacagcaatgaaaaagtaactaatactttctgtctgtttggggcctccgtctgttaaagcatgcagaacttattctctagtgaagggcttattcatcctgaccacgaggacagacgtggagttggcttttgagagccccgggtagcgtgcacttaagcttgttttctactttctgcctcactctacctgcagcatgcctgctgcctctaaacccatagctcctgtgctctctagaaatcaagcctgaagattcagttgccccgctgcctagagagagacaggacccaaattccagctgttctccagacagactccaaagtgnnnnnnnnnnnnnnnnnnnnnnnnncccccaccccctgccctgcccctgcttccatgcttctcctcatccttgatgctttctgagagtagagaggaacagttatctggctcttcatcacactgtcataaagatctttagccatcaccaaactaaactctttgaggtcattgtcgctccttctactttcaatcaccaagtgccatagctgagacggtgtgtcagccattttttttacacaggaatcactctgccttttcttccacttgtcctagatcacatgtgaaagaaagtgagcagaaatacctttgtcctgtcttcttaggaaccatatccattcgctttcccaaagccaattgccagacactgtttgttctctgtaacaaacaagcatggaaactcctaaacatatttgctgttacctgagctatcacacatcagcacttctagaacttttcacagtctgatgtgtacctagaaactcacaaaaatatacttggcactgggcagaaagagatttccttttcctccatgtcagccatctatcggtctgttctcactgcatagtttataagcacacaagtcagtataattgaaggtccctgaaaagccagccagtcttcagagaagttaataagacttgacccattccatggagacaaaaagaggtaatggttcaaaagcagctgaaatgtcaacaggacttgcaaaaggccaatcagcaaccccagaataaaaacgctgagttggtggtaatcttgggcagctgaagacagaagtgtattacaaagaattcaagacaaagttctggtgctgaaaagcttagctttgatgatctggagaggcaagagaaatagtcctgagctatttcccactttagaaagattttgtttatcctttttcgctagagttggagccaaatttgagttagttcttaatattcctggccactcgagcactcaagtcaatggtgcatttctgggaacagcctgtcaccacagactacaggctgagacagaaagagcctgtccatgtgacaagctttctccttttcatcactttgaccaacgactctaggacactggtacagtgcactgtgttcttcccagggactccgagttctcagctatgcattgtttctttacctgccttgctgtgagaggcaagacccttagagttgagtgaccattcttaataaacattccagtcacattaacacgaaggcagacagaaaaacaagctgatggcacacacctctaatcccagtgctgggaagtagaggcagacaaatctttgagactttaagaacagcctgatccacccaacagagctagtttccaggactacataatgagttcctgctccaatacataaataaaacacagaattagatgattcttgagaacaaagactgagtcctttcatttggaaacccattttagtccatctgtgaatctactcattcatcttataagtgattccatttacaatctctataagatttgccacacagtgaaaaggcatgaagctttaaaaatcaaatgtctggatccaactcctgatgtcatggtgtttttaaagtcctcggttttctttctctgacaataaagctaaggacttgtcttggcaagattgttttgagggtttgaaataatgtacctaaagttactggcgtataataagcactcgatgaaagagagtggcggctgtgactgtcatacattattatgtcgctctgttgagccagacaggcctatccagcttccatatccacctaaggaggctgttttatccctaaagactcattctcactaccttgtgactgactcatccaaactgaaagaggtctcagtccctgacaaagactttctctttaaaccacagttacctgactctgtaagtaggctcactcgcttgacctctgcctgctgtcttagttgctgttctattgctgtgaagagacaccatggccaaggcaacttttagtaggcaggcatggcactggacatgtagcctaaagcagagagagagctaactgggaatggcagggacttcagaaacttcaaagcccaccccagtagctcacctcctccaacaaggccacacccctaattcttcccaaacagttccaccaactggagcccaagcttcaaacagatgagccatttggggccattctcatccaaaccaccacacctgctacgctcaattttggcacaaaaatcttacatcaccgactaatgtcagatgtcattttgccctgtcatattgcctggtccctcattctgcatgctggctatacaatgctcagttctctctgtaatatgtagagttgagatctgcctgttttgcctactgcaactattttggatgaagtttttttttttcttaaaagagttcactccttatctccatgtgtctgtttcttactggacaatgcacatgaacttaacctctgatatggtttggatgtcatttgtcaccaaatattcacacactgggaccttgtttcctgttgtggtagagctgagagctggggaagccttttagaaatcaggcaaactatgaagttcttaatacactcatggctgatccatgagaagggctaagagaactcccatgggtcctccgagctctgatgagagcaggttgctatagaaacaagctccatccctgagtgactctggctttctggttcaatatgggatctccccctcacatgcactcccactgttgggacattgtctgccatgccatgaggtcctcactagagctcagccaatactgctgccatgcccttgaaccccagagttaaatagacctgttttctctataaagttagtctgcttcgagtactttattatagtaatataaaatgtattaatagagtcttcccatgccaggacatgccaccctgagagtccacttggtttctctgaagctgagctactgccagttggtataccgagctggacaaatgcctttctgatgatggaaggggcagagctggctccgcagatgcagttgcctccattgtaggctcagatctcctctacacacctgcctcagcctcaggaaacttctctgctcctctttgccacctcagtgcccccaaggcattgtccccctgtaaacctccacacatccttttagtatactacattactgagtcttcctatgatgaaaacaggcctatcttgttttcccaggtccttgagcctgggtgagtgactcactaatcttctgacagccttctctttagtgtgaatggcaggaactcctggatcagcttctcacacttatgtgtgcagtcaatcaggagtttatgctgaccatgaattttggagcctgcccatctgatcctgttttcctggtgacaacaatacctgggacatttgttaaatatacattacctggccttgcctctagatgctccaactttgggttgaggctctagaaacggaagctttgcaaatacttatcagggatgtcggggaagtgttcctgcaggcccagatatgttagggaaaggggagtggtatgaaaggaagaagggtggctggcgtagccattgctgggggtcacccagcttttccttggcaggtgcaagtccagcatcaggcgtgccctgtccagcatagcttagttatggaaacctgcctgggctgatgaaggaatggacaacggtcaaatacatgtacagaaaagctgggatctgatagaggggcaccaacgaggagacaattcagaactacctactacgtacagtagcacagcgggaggggttagatggtctcagttggaggtccctatatgtccctatagggaaacagtcttggtctcaggagggagatactgccaacataggccacggaccagaggaaggctttgtctgacctgagcctgacctaaggatggttttgccagctcccatgagtctgcagcattggtccttgtcaacaatacacgttcactcagggcccctacagctccccaccatcgcgtatcccatgcttggggaacgggaggctccgatcctaacaatcttggtgcctcattggcctatgggaacgcttcatgaggaatcatccctccagccatgcccctacagtttggtcttccatgtttgaaacaggatgatggcagccctgcgagaaacatacagctttcccgaactcttggtgtgggatttgtgtctctccaatgagcttcaatcgtaccataactttacccatttgatccccgggcccttcatgtgtaaaataaggtttattccactacattgaagccaaagctttttttcaaaagaagctgccaagctgagctgaaagtggggttgcatgcagtaagggaagagctggagtttatgttactggagagaagtgccggtactcattaatgaggtgccctctagtgggaaaggcaagcaaggaccctgtttcctcaaacccacttaaccggttactttgtacttctgggaaattaccctaattgccaccaagttgccctcatttttaattttgttatgttattttaatgcacgaaatcgtaaatgagccggcggtggtggcgcatgcctttaatcccagcacccggcagtcagaggcaggcggatctctgaattcgaagccagccaggcctacagagcttgttccagaacagctagggctaaacagagaaaccctgtctcaaaaaaacaaaacaaaacaaaaaaaaaacaaaaaaaaaaaaagaaaacaaaaccaaaaatcatacatgatgtgaagtgtcatgctttagatacttcggttagtctgtccaggctgccttaacaaagtacagcggactggatattttctaacagaagttctatagtctggaaaagccaagaccccggtaccagcagattcagggtctggtgaggaactcttcctgcttgcagcctctcagttagagtgtatgctgaatcatgcggtttctgaagtcttgatttttttttttttaatgaacactgttcctgttcatgaggatggacctgaccctctagagcagtggttctcaatctgtgggtcacaaccccttgggtgttgagtgaccctttcacgggggtcacctatcagatatgcaatatcagatatttatattaccattcataacagtagcaaaattacagttatgaagtagcaatgaaaataattttatggttggaggtcaccacagcatgaggaattataaaaagggtcacagcattaggaaggttgggaatcatggccctagaggctccttcgaaaatgtaaacactttttcacgtacaagttttggaggtacacaaactttcaaaccatagcatttgatatataattataggacaaggttaaaatccaattccacaaagctggtaaactagaaatttgtaatgcttgtttaacgttgatgggtaagtggatgacactgttctgcagaaactgcatggccaccttagggttagttaattagtcatgtctgatgttataatttagcttgtttttataacgtgagcttcaaactacaatccacagtatctgtgtgcacaagaaaagacatcccagccttgttcatggttcagcagaagcaaagcttctcctcgtggttctgtcagggaggaatgctggtatcagtctgtgccagggtactatcatagtgaaaaacaaatctgtaaaaatttggaggttttgtttttgaagatagggtttctctgttagctctggctgtctccgaacttgatctatagaccaactgacctcaaacccggagattcccctgcctctgcttcccaagtgcagggattaaaggcgtgagccaccacggctgggcttgatttgtaattcttgtaaagaagctccaggcctttgaacaactgtccagagatgctgtgtagttgagcatacaaggaacgctacctctcttccccttttttgacattcggctccaagtccaattctgtcacaaactaagtgttaaaggctggggcaagtttcacagctctgcgtctgttcctcccaccaatgctgcatctcacaggctcctgttgaaagtgaggtagggtatttgaacacatctacacctctagcctggttaccaaagggaaaacaccgtggtcacaaaggcagaagcaagcggctggaaatttacatctaaagactttaaaggtgctaacctgtcatcagcagtagtatattatgtgtttccgggtacgcccagtctttgtcctgtgagacgccctaacatgcacaaagtgctggctggttcgcaggaagctgacccaattgctcactgctgccctcttgagtgcataacttggattgcatgggatgctgcctagcctgcaaatgaggaaaagccgtgcaggcccaagacaaacgcttgtgggctcttcagctggacacctaacagtcatgctgtctgtgagtgcatgcgcatctgcttctgccgaacgattgaagagggaattggcacttcccacccttgccatctgccagtcccagtcccttcaggcctgcacaaacaaatcatttggaatgaagcctatctaactctctctctctctctctttctctcctctctctctctctcttctctctctccctctcctctctctctcnnnnnnnnnnnnnnnnnnnnnnnnnnnnnnnnnnnnnnnnnnnnnnnnnnnnnnnnnnnnnnnnnnnnnnnnnnnnnnnnnnnnnnnnnnnnnnnnnnnnnnnnnnnnnnnnnnnnnnnnnnnnnnnnnnnnnnnnnnnnnnnnnnnnnnnnnnnnnnnnnnnnnnnnnnnnnnnnnnnnnnnnnnnnnnnnnnnnnnnnnnnnnnnnnnnnnnnnnnnnnnnnnnnnnnnnnnnnnnnnnnnnnnnnnnnnnnnnttgaatcaaattcttttctaacttggcgctcataaatgcagcatttaaaagaaagtaatttcaactgagaagcatgggtgagaagacccagcagggttaagaagactacattagaacatctgtttttgcacgatgtttaatcctatccttgaatttctattttgcacgatggtttaatatatatatataatatatatatatattatatatattataaatatccataagtcctgaaggaatgctaattgcatttcatttagttattttgctgatgaaagaacagacaatcataaaaccttaagaagtattctagaagagtatattagtctttagagtaacaatttttccctttagaataatttttttgcagattttatttgaattagaaacataattgttttacatgacaatcccagtttcctctccttcccttcctcccctaccagcctcccccaactaaaaccctacctatcacataacctttctgctccccctggatggtgaggccttccatagggtgtcatcagagtctatcgtatctatcctttggtagagtaacaatttatagaatgaatcactatatatacagaaaggggattcataaaaatgatatacaggttacagtccagctagtccaacaatgatggaaggtccaaaaatccagcagtcattcagtccacaaggctggatgtctcagctggtcttcagtatgtgcctaaatcccaaagtaggctctaatgccagtaaaggaatgaagttcccagtggggtgagagtaagcagccaaagagcaaagtgtttccttcttccatgtccttgtatagactgccagcagaaggtgtggcccagattaaaggtggatcttcccaactcaaagatccagattagaagtgggtcttctggcttccaatgattgaattaagaaaagaccaactcttaaaagctgttctctgactcacatgctcactaaggagtgtgtaagtattcgcattatgctggccttcccctgtcacctggcagaatgcactcaggcagtaccctggtcagcccagggttccatgagtattagtctgcacgaaggtgcaaatgaccctttaaaagacagactcccacccactaatgctctctttctgctatttcctttctttttccagctctgctctcctctctcgttctgtctccctctgtctctgtttctctttacctcttttctctttcctcccttttctccctctcttttctaataaaacttcttactcaagctctgtctgcctgtaccccacctcgggtgcaatggtcccccacgcaggatccccttccagctttatgccatcattttaaacaaaagaacaacaatgtgagcatgcaggcacacacacacacacacacacacacacacacacagattgtacagccctgactatatcaccgttttataaattcatgcacttaatctctagcgattgctccctgcctttaggaagcagatgctggggtgtggtgtagcactaccaaacacttaggtttcctgtgatcaattacactctgtagaaagtctttgtacctaaagctttcttctgtgtatcagataatacgttaggacagagtgtcaacagtgagatgtcaaagcccactatttcacaggggcctctactctgtaatgacttgctctctttcatgtctctctgtgttgctgtgacaggtcacagctgccttcccaccagaaaatgtcttgtgacttcctgtgtggcatttcttgtacttggagttgtcgtcacagtgattgctgttgggatcacctttgggaagcctgcaagtatgtgtcaccacacacatgtatttacactgcggatgttccaaagtgggtgaacctactgatggggagtggttggcatgtgctatgtgccagccatcagccattttgcacatctcttgctgtcctcaactccgggaatgtgcctattatgggcagttatgaaggacactcagggagaaagacagcttgccctggatcatgtaactgtgaagtaaacaagaaagcgttctgactcaggtcagcccaattcttaagtatacacaggatacggtctctaccttcaaggaatttccactgtaaattgggcaatgggtggcggaataccgtataattagaaattagagagaactcagcaagcaccagtgatgaagggacatggaaatgaaagaattgaaactggaactgagccttgtagggacccttgagtttagactgtttcgggggcacaaaggacacggactttgtcttgcatcaaacctgaggtacgtgaggaagagatatgaaaaatagtgttaagaatccagttcaggtgtagggggaggggcaggtgggtcacaagctcaagtcagcctggactacatagcaagattatctcaagaccaaccaaccaaccacaaacaaacaaaaagtggcctcagtggatgaggtcacacttgctgccaagcctgatgacctgtgtcattcagccccacatggcagaaggagaaaatcaactcctgcaaatggttcttagaactccacgtgagcactgtggctggcatgtgcacacatgcacacaaataaataaataaatgtaaaggaattaaaaacaaaacctcatagtgagaaatgggtattgtctaaaaagtaaaaccattgcaattatacacatacacacgtgtataacctagctccctcccctaccttgcctctgctgtgatgtgcttttcttccattgctcatttgggtaactcctaagggtaaaagaccaaactcagatgtccccaggatctctctatactagacagtcccagccactagactctggatccatcactctgctttcccaacagcctagttaaggtcagtactgcagagacactggagccagcccatgctgtaggatgtgggcagtgcttcagtgaggaactttgcacacagaccttcattaaatctgtcctgccgtggacattagactttcttcagggtttaatgttccccacctgtgcttgactctgcccttctccttcataggcattgccccaggtactaacttcccaccagagtcacatctcattccatcctagtatcaatttttcagagggtccaaactgatatcaattccttcagatgaccagaactaaggattcttgtttctgaaaccacaatgcctttaccaattggatctgtttttatctgcctcttaattgttcaagttgaaaatgcaccatcatcaagtaaactccaagccaagtacctcagatatcgcccccactgtgtacccctttgcacagctgaaagggattatgggggaagacacaactatgctgagatacaagtgtcaccagtgttgtggaatattattttagctaggcaaagatgtcccacttgtttatgctactgaacattacttttaactgtgtaaaagtgtattacatatgtttatgctgcatttgtttaattatgtaacaaagtgttgcatttgtttcactttgcctgcctaagacacctgatcagtctaataaagagctgaatggccaatagctaggcagagaaaagaaataaataggagaattctaggcttgagagaataaaaggaataaagaaagagaacagggagaaaaagagggagaagcctggaacagaagccaggcagctgctagaaagacacaaagacagcaggaaagtaagaatgaaaggtaaaaagccccaaggcaaaaagtagataaagagaaacaggttggttaaagttaaaagagctagccagaaacaagcctaagctaggcctagcattcataactaataagcctgatacacaccagtatttctataacttccatcagtttggttttttttcccatagcacttgagatttttaaaaagacctttccctttcaaataggtagattccgttatattttaaaatactatcatgtgggggctgagggtgtagcccagtggtaaaatacttgcctagaatataggaagtcctaggttttatcccagctctacaaacttgtggaggcctggtgtcacaaacttgtgatcacagtactccagaggtagaggctggaggatcatgttcaatgtcagtgattcgaaaatcaatctgagctaagacatgttgtctcatcattggtcatcatcatcttaatcagaggcgaggttgtaacttgctggtagatccctttcccagtattcgtaagaacctaagttcaatctccaggacctccaaaacaaaaatcttaatttaattttactcacaatacgaccatgaggttgacatagcaagttacctcagctaagaaaaataatagacaggactgtaatatccaatccgttacagagctcataccggggaccaggcctgttgacctctcagctgcctgccattacctcttgctgggactgagtctacacttgtttgccagatgccaatggttttgagggaaaaggaagaaccatcaagttaagaaggcctatctctggagagttttggagtatgggtgggaaagaaagaagggggaagaaatattggggacagtggcacaaagcaggtgaggatacctggcattcttgcatctttcagatcagctgtctcaccaatgcagaacagcttcacagcaaccaggcttcctgtgtgaggaccacaccacttgcttgctgccctctctgctttgtgatggcaagatggactgtggagatggtggagatgaatctgccacctactgtggtgaggtggactgaagttggttgtttttagtctcttattcttactctttgaggacctgccacccagctcccaaataaatacacagaggcttattgtttcttatgaatgcctgcattagcttggcttatttctagccagcttttcttaaattatcccgtctaaattttgcctctgggcttttaccttcctctatcctatatacctatttttactttttactacatgacttgctgtgtagctgggtggctggctcctgctgtcatttctccttcttctccccccccccatctctctccccagatttctcctcccatttattctttctgcctgacagccctgcctatttctctctgctgcctagctattggccattcagctctttattaaaccaatcaggtattttaggcaggcaaagtaacacagggtttttaattaatgtttgtacttaaggagcttcaatttagaattatttttaagcaaatgagttaaataaatgtaacctaaaagaatgcaacacatctttgcatcattaaacaaatattccacagcataaatgaacagaaccatcaagttaagaaggcctatgccaccaggcagtggtggcacacacctttaatcccagcacttgggaggcagaggcaggtggatctttgtgaatttgaggccagggcagaggcaggtggatctctgtcaatttgaggccagcctggtctacagagttagttccaggacagccaggactgttacacagagaaaccctgtctcagaaataagtttaaacaaagcagctaaaatatgtacatgtagctactatttaagaactataaggtaaccctatgcagtcttaaattcagctgtgctaagtttcagacagtcaagcctacacaggaaaaccctgtctggggggtggggaggaggggagcctatgcctggagagttttggagcatgggtaggaaagaaaaaaaaagaagaaataatggggacagtggcacaaagcaggtgatatccagcattcttgcagctttcagattggatgtatcaccaattcagaacagccctatgatggattaggtatacagtcctgtctattattttcttaaactaatattctacaacagtagacaaagtaaagaacaatagccagggctgggcaatgtggcccatgtgtttaatcccagcacttgggaggcagaggcaggtgggtctctgagttcacggctaggtctacacagtaagaccctgtctttaaagcagtagggtagtagtagtagtagtagtaagataaacttcagaactaccatttaaacattttcatgaataatttttccactataaataatttatttatacaatataggtcaaatgcccaacagtctcccaccaaacttgattttcaagtgtcccaaccagaagacatggatatatgtggacagggtgtgtgacacaaagaatgactgcggtgactgctcagatgagtcaggtaaaaacgaaaattccatagttgatctttttaatgggttctgggagtggctgcccttacacttcaattacacaaattagccctaacttagaaaccttctacaggggatttacacacacagactaagaaattctatcattccctaggccgcagggaatgccaaggtagagagcaggcttaggcaggctgaggatcctggcttccattcctagccccaccaccaaaaacaaataggaaggagatagacagggagagaagaaaggaagatagcaggaggaaacaagaggggaaggaggaagagggagggaactatattatttcattagttcatgtctatttcaagtaaacaagttctctagcaaggaagttaacaaagtcagttttgcaagaaaatgttaacagaaagctctcatctattatcaactttcacttgggtttctctggcaattcttcaagatatacaaaagttttgttcagtgttttagctctcaaaaaactagttgttaacctggtcatttcttcctcactttcatccttgtcccccatcatgttcccaacatggcttaacactgagctgcaaagatccctacttcacaagcaggcaagaccccaacccgtaggcagtccagtgcatgatggctccaactgatacactggaagcggcatcagaaacacacagatctgctctttgccagtggtggagggtagaatgaaaacacatttttgtagttaggaaggagagggatggatgtgtgaagagggcctttgcttctggctagctgacaattagcaaaggcctgttcccctgctgactgattgccccaactcaaggggacccttccctgtttactcaccatgtcagtatgtttagtttgggctgatgggtagaggcagtttcgtctctggcttttcaaactatgtgtagaatcttcagcaatcatctgctgattttcccatgatagtttcactgatttttttttttaaacctaaagggttatttcttgtccaatagtatttttttcccagttgacattttaagttatgcttttaaaaataaatacaattgtctagtttcacagagcccagcgtgctcaggctggagatgtgatactgttttcttcgctgactgtgcctgcattcccagaagtcgctgcagaaacggcatccaagactgtactgactggagtgatgaaaacctgtgtgattaggtttataatcgaggtttcagaaaagctgaaaaatgcttcttgccctaagacttctctcaaagtatcggcgtgtctgtcttccatatttaccttcttggaatgtagggaaggaagaacctgtgcctcgttaaccaagaaaactggcagaaatcagatgcaactttaggtccctgttctaaatttgtttgcaaataaccacagggttatgtgggaagcacacacatgtactcttgttttaaccagtatgaaaacagttaccctaagaacttttagatggagatgcctagttcactagtgtttaatagccctggtcccagatctagcagaaaattaaatttttaaatgtttttaaattagtacataaagtattagaagtcattatggcatttttcaaagtgtgttttaagtagatagcctccatgctctttttaacttcccctgtagtctccttcccatgtgtcctttttgtctccatctcctccttcctcaacatctctttaccctctcttggtctcttctagcttttgaaggctttatgttaatattgtgttcaggtatatattacaagctaggatctgcatattagagaatgtagtttttatctgagtttgggacccattttcctggaatttttatctttcttcacagtggaataaaattccattgaacatctataccacaattttcattatccatgtgtggatgatcatctagcctggctccatttccgtgctactgtgaacataggagtaatgaacctgaatgtacaagtatcttggtaggatacacaattctgagtacatatagccaggaatagtatagctgggtcacatggtagttattttgggggaaacacccttactgatttccataatggctgtcatcattggcactccctgcaatataattaagggttcctctttcctacatccttgccagaatttgatgtcaggtttcttgaaggtggctgttctgactgggccaggtgcaacctctaagtagttcaatttgcatttccctgaaggctagggagaaaaccagccttaacagtcaagaaatcatcagcagaccagaacagtctccttcaaccttcaaggttctaacgtgattgtgctgtccttcaccagtagtaaccagaaactgtagacaaagaaaactgcaaggatatggtagattgtgctactgttactaacactactctaaacaaccctatgaccaccccagtgacagtgctgtcctctggctgatgtagtctgtggtattatgtgcatcacttccgagcctaagtttggggagccagctggtgatatgccaccttttctatcacaaggctggcaaggttctaattaaacgctgctcctgcaataaagtagaacagaagcaaacaaggcatcaaatgtgacgagcctttggagcttttttctgataatagagattatgaaggaaaatgtttccttattaatccacagctaccaacacactatcactcaatgaaaaaccagcaaaaacacttgcagaggctgaggaatcaactctggttagtgacagacccagctggaaacccttcctacagacctaaatcacagccagtcagcagccgtctctacaaactgaaggaatgtcactgtcaccttaagagttgacatcctgagacaaactgagaatgtttctagctcccactcacaacactccagctcagccattccatctgtttggattctaaaaatgagttttcccaggtaacagatttatcctatttcctatgccccatcattgggcaagctgtgtttacaaccaacctgacccacaaatgtctgggtgactaggatttttagctgttgagacctcaggacccttgttaccactgtagcagtcgaccttgagggatgactgcataattctgcacattcctcccaacttcacatttgatacaactaattctgcacagtaactctggaatgcagctgtacaacaccttaaaaggggagcttcgaaccacagtatatatttaaaaccatctcaatagtaaaggcaattttcagctctcttgttgttcgatgaagggacaaggggacttgctgggaatggtggaactggtcaatattctgattatggcagtctcagtgttaacatagagccttggaaattagtaactgaaagtatcaggttatacatacaaaatggagatactaattcatacctcataaagttagaataaaacgttaaaactgagatacagggctgtagagatggctcagcagttaagagcactgtctgctcttccagagaacacaggttccattcccagcacatacatacatacattcttacttatatacatggaggctcacaaccatctataagcccagttccagggatcctatactctcttctgacctctgcataaagataccatacacttacaataaataataccaagagaaaaagcatcctggtttacccacagaatactgttctcatagcacatccaccacacagagcatgaaagcccctagggttggtggagaagcaaactctccaatacactttcatttatcaccaaatgctatcattacaaccacacaccatgatcaactttctataaactgctttctctgtatagatgagtgtcgtcaaacaagccatatactaggcaaagaattttattaacccctttccaaactttattcccaggcttcttcagcttaatttgctgcaaagaatgaattgtgtttaagcaaaaactgaaaagagctgcagtgtccagggggcttgggcttaaaaatattaagagatctagattttatcagatccataaacaaaagaattttaaaaagcagtcatgatataaaatagcagctcctgtgacttctgcaagtgtcaccttcttcagaagtcgcctcaattcaatttgcctcgttcttagaagcctcatcaaaattctccaccagatctagaaaagaatcaaaacagacatcctgaaaaaaatccagctcaaaaaaacgtacaagtatttatggaaacaatctcaaatttaaacacttgccacctccaatgagactattttggcacagtaagtgtggtctggcatagctactggagtgaacatcatgcttaaaaaaatctattttatcctcaatttaagaactaaatacaacacacagattaatataacaggactaaagactaccatgacatgatctgagtctttcttgggtttcagggacatttgtagaaactagaaaatgtatgcatttttaaaaaattcctccacaggacataaactcaatgtaatttagttggacatgatgtcatttgtctgtaatcccagcactggagaggttgagtcagaagattctcaaatttgagctacatattgaaacaatgtttcaagtaaactaaaaaagaaaaacattgcccggcgttggtggcccacgctttaatcccaggacccaggaggcggaggcagtggcagcggcaggcggatctctgtgagtttgaggctagcctggtctccagagcaagtgccaggaaaaacattgctaaccaagttacttagctttagaattatcacaccaagatatttaaacctctcccataccatttcataaaccagtgtgtttcaaagtagcatcagtccctattcccttgaattctctggctttaacttattaccaccatcaccatcctggaactttttctgtaaaagattcatttttctcccttgccaaagtgattcttacctgggacctcatcatcatcatcctctccagtagcaagtggtgctttcccatccacagctgagaaagaaacatgaaaatgtaaccaacccattttctctagatcaataaacatcaaccacaagaacatatgaaacaccaagtcacaactcacatttgtgatggaagtgacattgaattttcacctatagtcccattaacaagaaattgtgatgggcacaaactactgaaacacaggtaacagtaactctgaatacattgagaacagtgattagggagcgctcaaagatgaaaccacacaccaaattatagtcaggcttattttgggaggcaaatgaggaagccagccatttccctaaatattctgtgcatggcacaaagcccaatgaatattgaaataaaaacttaagccaaatgtggtgactcacacctatcaaccaccgaacttccgaatgcaaaggcaagactataagcgaactccataacagtccagcctacatggggagacctacctacctcaaaagccaagaaggggaggaacaaacaaaaaggacaaatttaaagtatctttcaactgttaactaaccactgttactcttttccttcccctttcctgaaatattaggaactgaattcagggccatgaacatgctagcaagaactctgccactgagcttcactaaccagcctatttttaataaatacattttaaagacagtttaatttgcccagtctttcaacacataaaagttccatcagtacaagtttcaaaagctggtctcaaagatcaagatgacctaaaacatcttgatgctcctcccttaacaataaaagcataaaatgagtcagcatctaacaaacagctgaggaaatagcaagccttagagtaagcctcttgacttgcttctgcattcatattcttaatttttaagccaaaacatcaagcataaagctgccacaccacctaggatgactaatcttggttaatttgacacccagggggaaggaccctaaatgcctccatcagatcagcctagtgacatgtatgtgctgcattttcttaattgataattgatgtaggagagaccagcccattgtagactagtgccattggtgggcaacttggcctggaataagaaaggctgtccagggccagatggtcagtcctgaaaacatacatgtaagtaacattatacacaccaaagaggttatatttaggaatgtgtgggtatacatacacccatacaataacaatgaaaaaaggttatgaatttaaaagagaacagggaaggttatatggtagggatgggggtgtgtgattataatctcaaaaataaaaagcagttgattgtgagcctgggagtgagccaataagcaacagtcctccatgggttgcctcaagctcccgccttggcttcctttgatgaactgtaaagtgcaatgaaataaacccctttctcctcaagttgcttttggtcatggcatttattacaacagaaatcaaagagaacacagcttgttgtacatgtaggttacagtctgccctaaacaaaaaccttaccaaactataatctgaaacaccaaaatatttattggtacctatcatctatgtcaacaataatttattatgtgtttataagtaattaagagccccaaaagataccaaacacaaagactgtaaataaggatatggaatgttagtattattcttgtttttttcttagacagcatgtttgtagcccaagctggtctggaatcctgtaattctccctagttcagcctctcaaagtgttaccaagtgtgagtcaccatgcccagcctgtcaattctaatcctaaaacctagcaaaactaagattaacagttttttttcatttctaactaaagttaagtttttagtgattcaaacctagcaagttggtaagaaacaagcatccacttaatcaagtataatgatcacagaaaaagtagacacatcactgtaaacgagaatgagtaaaagcagttagttaaagggtgtattattcttttaggcattctgtgtctaaggacattcttagcaattctgagcctgagatgacacaaatgtaactctgaggatactcacattgtttgggcaaagcttcagccagtctccttaaactagtcagactgtctgccccaagctggtttaggatgctgggaagcatttctgtcagctgctttgtctcagcgtggcctgtaatggtgaaagtgtttgctgccagagacgcctgaactttagggttgttaaaatggatcactgttccttggtttgtaaacatgttcacctataagaaaatacaattattataagtaatgctcaccaacaattcctttaaaatcagtttttataaaactataatatgtctgagttttccccctttgaagcacaggtgacaatttcccaggaatgtgtaatcaaataactgtctggcttcccaatctctcagatactcaaacatctaatggagcaccgactacattgctaacagcagaggcaagacaattacttaatatatgatcattaaaactttccagtttcgtggtgctttgacactcacctcttcaataccagagatgttgttcacccctaacttctttaaggagaactgcagttttttatcatctgctgtggctgttctgtgaaccaccttcttctttctgcgagcagttccctagtgggagaagggcagacagcacatttacacgacagcagtctatcctaattcttttcagacctttgcttctgtacaagttagttaaccagatagaacatggtggtgaccttgttcctttagtcccagcactcaagaggaggcagaggcaggtggatctctgttttgaggccagcctggtccacatagtgagtcccaggcaaaccacgaggctaggtttcaaataaaaacaaaacaaaaacccatagaattttaaaaatagtcaccaaacccacaaaccatgaagttaaaaaggcaggttacaacggaagtatgggaaaggaatgcttatgaattttttataagcactagtttgtaagatgcaaatggtcccttacaagtcctaacatttaagtcttttaaaaagtgatcagagatggcatgtgacaacttaaatgaaacttcatttataccttttgttttcaaagaaaaaccaaggccttaattaatactcacagagggaatagtaaacaaagtaaccaatgaatctgtatacagatgtctactacagcagagaggacaaaggtaaagttcttaaccaacccagatctttctaactgaagatcctctttgatgttccttaaaggagaacaggctagtgccctagtgcatctctgaatgctatccctcttccctgtactgttcagcttcctccctagagtacatttcttcttcacccaactagggacatccacaagcatcagtcttgcctaatttactttaagttattctcactcatttttcaaaatgctgttcaagctattattccatctgtcttcaaagccccaactctgcattaactgtatggcatgctaagccactcccaaatgtatactatgaaaagacttctataacactaagtacaccaccaccaggaaaagattagattctaccacctatagatttcacacatttcacaaatgtagaattcactacacttactcaaagaattgtcagcatttccattagacaccgaaaggggtcttgaataatattcacctgaaagcatgcaaatctaatactgcttttctcactcacactataaggtttcttaaaaggtacagaaagatgtccccatattatggctggaaacattttgtcttagcttaacaaatactagatacaaagtctactgtataagattaacttggaaggctttcgttttcccttagagatgcccctcaaagttaaaagccattagaggaaccaccttgcacatcactccaaaaactatactgaaagaaactgtcaccactgccccaaccccagcacccgaagggtactatgttaagataaaggataagaaacatccaatgttagtgtcgtgaatggaaactgaagattacaattgtcagcaaaggcaaatcaggtgtggatgttaactgttgatcaagtcagctaactaagcaaagctgtgtcttatttaagctatacgcaagatctggttatctcacagaaaactctcctgaaggtaaatgtttaaagttaggacaatttaataggtaataaactggtagaatggaagctccacaagttttaccaagtaaagacatgctctgattcaaccagcagacaccacaccttgttcaaaacttcggaatgtgctaacacaatacatgaaactaaggagatctccatcaggaactgacttcagattagcaaaccaaacaccagattcaataaagaatcttcattaagcttagtaaccaccaggagtaaccaattagccaacacattttttctcccactgtaggataattacaaagacagaacaaaaaaagaaatctaacaccgactattcatgaattccaaaaatatcccgttgagtatttagttcagaaagcattgctgaaaaggtcttaattaacgaaaataaatgttctactttctaagcattaagtagaacaacaacaaaaaaaacaccccaaaacattcgggggggggagcgcaatgaagtacatgcctagcatgaactagaacctgtgtctgatctccagcacagcttaaaataaagaaaaaataattcaccaattttgtacaactcaagggtagaggtgtacaatgatttggcagagaggaccttctcccccattaataaaattaaatatactttctgtttatatgttgtaatcttagaaacacgcaaattatgtttaagtgttattttcttctctactaaattacttgctaccaccccccccaatatacagcttccacgtttctttgtgtgtctcatctcttttggattggcaggcttttccaatttcccctgccaagcaaagtgacaaaacagcgtgagaaatgcaaagggaattttaaaaagtaaaaacaagaacaacaaacttactttcccaccgatgcgcacttgtgcctgcagcttggccagtttttcctggttcatgatcgtttctttcatctggaaaagagaggaaatcctcagcaaagaacggtcgggctcactccagcattccacgctcgttatttcccaagacacccgcaggagaacggcctccgcaggctgaggcctggatccccaaattcaccctacgaaactgcgaagtcggctcccagcgagcccggtgagcacaagcactctcgccactccccgcccccccttccaggcccagactcgggctcacccccacagcattccccccacccgcggccctggccggcctcggcctccccagggcctgcccggcccggccactctccgcaggcctcgcggtacctgaggctcctgtcctcgggttccgccgagaagtggaggaagagacggcgtcgcctcgcccccggggcagccgcccctggctcgccctcgcccccgagagtcagcctgagcgggagcgcctgtccgtcgcatcgctttcctctcctcagccctgtccctccctgtctcgctccagccgggaactgcccgcccccgctcccgtcctcctcccacgccggcgtccacagcctttttgtaccttgtcggagtggaaatggggccgcgcgggggactagggttcgcgctcaggggtctcgggcagaccagctgagataaggcgcacacacgcggggacgcaagatggcagctagagggtggccggaagtgacgcatcgccacttcctccggaactcaggggactcggcgtctctgcgcacgcgcggccggggccccgcggcgagggtgcgggttcggtgggctcccagttctttccttgtgtcccgcggcgtgccgagagcagcaccggagagctgtgaggcgcggacactggccgtcgtcctgggaaaggctccccgtggagctgtggttaagtcggtctgccctgtgtctccccccccaggacgtcccgctctgtccagtagacagcagtgtctgctcaatgccgggtgtaaatgaagaaaaggtatcaaaatcagggaagctaattgctttccagaattaggtggcttgagtgatgttgaaaatcgcaattcagaatttctagaaagcgtgttccgaattcatcccggtaccccacccctcagagcaattccatccattcaaggttgaaacacagtaacagatttctaatccccttaaccctccacaccacggcggtcgcgtacttaatttaatctctagtaggccaacggttgacttctcgatatcgattttgcgtggatttgaccatgaatcattcacaatggagcaaattttacggttagtaattgaatcagagacgaactggggcctgatgtgcttggagaaaaaagcgcggctgtgagttaaagtttgctgaactccagtacaaattgtgttttgtagtgtttgcgttttttgttgtgtggcgtgatggttgttttgaaaagtgtaggtagtcctggctagtcagaaatagctatcctccaaccttgggtttcccgtccggtgctgggattacaatcctgcagcaccatccccaaacaagttttaagacaaccttaaaaatcatctttgtggggggaaaaatataaattttagtgaaaattctgtgtagtcagccttcttgcaaatttagttttgggatgcttttgaatattcaaaagttaaagtgtgatagaaatttgagagaaaataaaatttatctgaaaaacctgtgtaagtgcatacccctctagctaaaatcagtttttttcttggaaaacttttttacaagaaagtttacaacagtgatgtgtcattatgaaaattggggggataactaggttgctttgtaaagtgattgtaacagtttttttgttttttcttttttgtttttgaaacaatgtttcttttatccagccggtaaatttatctcccagaaaaccgtgcttgttgtctaggctatgtagttacccggcctagccataaagatccaaataactgccaggcggtggtggcacatgcctttaatcccaatactcgggaggcagaggcaggtggatctcagtgagttggaggccagcctggtctacaaagtaagttctggggcagttacgactgttattcagagaaaccttattttgaaaaaagaaaaaaaaaatccaaaaactgaggtgaggcaacattatttagtgctacaagaaaatctataaaatatataactgttacatgtgatttataaaactcagaactagtcctttataaagaaatttatgtctataaaatattatatccttggtattatactgagggcatgtgaaacttttttttgttttttgtttttcgagacagggtttctctgtggctttggaggctgttctggtactagttcttgtagaccaggctggtctctaactcacagagacccgcctacctctgcctcccgagggctgggattaaaggcatgtgacacccagctgagggcatgttaaacttcttatccatgatgttttctaaatttttacttaaaaccctacatatgcaactgacacctgtttcttcttttataccaatattcaagaaatgtgatttattttattttcccttgttcctacagtcaagtgtacacaaaccttgtctcaaaacaaaccaacaaaagaactgaagagctttgttgttgtttttctcttcccccagtagttactactttgtagtcttcccacatgttcccaatgtctccagcaaatgtcaaaggttgactccccatcatttactgttcatataaaacagtgcaagaagtgcttatttagcatttgagatggtctctgtcaacagcatgtgagagaagggaaacatgtttgctcttcttgatttatagcctatgtctaatcaaaacccagaaattgttttcatctctgacctgaacttgagttggcttcagcaaaagccagatatttacttgacattatgcttaatccttttactaaattaaaaaaaaatgtgtgtattggtgggtttctcccaagccatctcacagtccatgttcctgtgcttttagatgcttgggaaccactaaaattcccttacatcctccttccagcatcactgtctctgccaagttaatatctatacactggctctccgagtctcaggaaaccttgctcagatacctttacctacactagtttacatctctttgccacagaaatcttgtttttcttgtagtcaccccgcccccaaattgtctgtgtgatgtcaggtagtgctttaacttgtatacacagtatatatattccacggagaatgtagccctgggggcacatggagcattagtgaggtgattgatacaaaccttggccggatgcagagaacagtcagtggccttgaaacatggtttgttcttttgcctcctcatccagttcagagaaaaaaataaattttccattggtagaacccacaaggtcttggaaggtagatctaactggtcaatattataaaatacatttaagaaaaactctcccagacctcctgacagcagtgtaagtactggctggcccagtggcctgacctctgtatctagatagggaaaggatgacccaggaaggatggcatcggtggacgtttatgatggggcagaggaagatctttcttcatccctgcttgctgcaaggaagtttctgagtgggtgaaagctgtgcacaaattgtctgctaaaaccaagtatggggttcaatgcaatgaacaagtcactttggggcccatgttcacacaggggcaagaaaacacaagaaacgtctgtttaacccctcagatggagacattgaccctacaagatgacctgtaacaatcgtctcacctcaaaccacagaccttcattgctgctgaggttggtaacacataactccactcttctcttccagacaaaccctagctcatcaacaacactgtggcagattccttactgagaggcagaaacatctgctgccaagaaggcagctattgaaggtgttcaggagcatatgactgagtcagagtcacaactgccagtttcacacatcctctgttgggccccacaggcaagcacagcagggttgtcttcctgcttgaaactctggctcagaccttggctctgttttatccagtgaaaatccttcagtattcctatcatgtccaaaaatcaaggggtggaagtatgggcggcaccattcactattgacagagcttgctctgtcctcctgcaatgtaatgctctcctggcttagaggccttagttccagaaagggaggccgcttcaccagaagagatagtagtgatctcactgagctgaaaattctatggtcacctggacactctgggttccttgtgccactgagtcaacagaagaaggaagctgagggttttttgtggggtactaactaccaaagagaagctgggctactactactccacagggaggaaaggaagagtgattcttgaatccagaggtccctaatgaaggtttaggtcactccattgggtaaagggccataccagctgaagttgccaaaggcaacaggaatatggtgtatagtagaaaattataattaccagctgtaaccacatggcaagttatagaaatgaggatattatatcattactatggcttctttttatgaaaaaaaaaatgtgtatttgattgtacattactgtgctggctagttttatgtcaacttgatacaagctaaagtcatctaagagaagggaacctctataaagaaaatgcctccataagattcagctgtgggcaagcctgtaaagtattttcttaaagtaatgaatggtggggtagggcccagtccattgtgggtggtgccacccctggactggtggtcctgggttctataagaaaaaaggctaagcaagctttgaggatcaagccagtaagcagcacccctccatggcctctgcatcagctcctgtctccaggttcctgccctcactgcttttgatatagaactgtggatgaaataaaccctttcctcccaaagtcgctttgggccatggtgttttcatcacagcagtggtaaacctaagactattacttactggttctttttctggaggacccttgtgaacacaagggacaccacattctaccaggaactgcacagtaggaaagaatcccctgggatctgaagggctggagtagctgagaatagaacacttcagaccaacagtaagaatgaagcataaagcaattaagaaggctagaaggggcctggccctgccccaacctgttgtgccagactatgttaactcctcataggagaccttaccagtgaggaagagtgcactgagtgtgggctggggggaaggtgagagggttgggaggaagcagggggatgggagggagaactgtggttggaatataaaatgaaataaaaaaatttaaaaaatataaaaaaacccacaaatttaagtgggacaaacaaaataaaagggggaaaaaaaggctagagcagtgctttctgaagcctaggactttaatcacatttttggtggttcccagttacatgaggcattatgcatcgatacaattatacttgaagggctctagcaggccggagtggcaaacatggcaccaacaggttttgcccttttcccctttctctcctcccccttgctgaaaactgttagattacattcctaaagctagcccccagggtctagttccttatttggccacagattcattcctcagactgaacaccaaggtccagcaatcaaagttcattattcggctaacatgtccaatcagaacttaccaactcaccctagcacagactcctccttttctccctaaaaacccactcctgcaaacacaactgctctcttgctgcttgctgtctgcccttgcccaatccagaggcagctccccacccctgcttgcccctccgggctaataatctcctttgtgctgagatgttggtgtttggggatgtcctgtacccattgagagtgggggcaccaacccctcccttactatactcattttagttctttcttaaaccctcttgtatggagaaaatgttctttggcaacaagtaacacacattgtaacatttggtaacctattaaagggagagcccatctacacttagcactctctgtagccacattacctagataggattaaacaatattttcctttcctttatggtgattgaaactaatttactgttttcagttgtgatagttttcttttcaggggctggaaaaatgactccttggttaagataatttgttgttcttgcagaggatggaagtttgagtccaaacacccacatgacagctctgcctgtaactccagttatatgccctttttgacttccagggcactaggcacacacatgcggtacacaggcatacatgcagttttaaaaacaaaactttaaaattcaagcacttaaaataatgtttaaaatattaaaaagaatagctttggttgtctaaaactaggcctatttgtgaaatcaacaaccaacacagtttttaaaacatgagagagaaaagttttcaaagttacttatctaggtgatattaaattggttgatactcgggcatcttagaaggtatgagacagtgtgtagttggctaaattttcaaagctatgcatgcaaagaaatggcaaaggatgagactactaagataaagaagcagttatgagggtactggaagacatgctaagaaccgggagtttaaccataaagtgaataaaggattcttggaaattgtgagctgcaaaagatgtctgttgacacaccccatgtccaaagatctgagtggggacaaaacaggggactccaggcttctgagatcaacaggagtacaagcaaagcacttgtcatttttataattaaaacaagcaaatgaagtgacatttacagttagcttaagcaaatacaggtagagcaagggaatgcacctggtgttccctctttggtcatgtgtacagagccaagaacattcctcccaggcctttgcctttccacatggaagctgcttgagggtaaggtagagtgatttcacaaataggcctagttttagacaaccaaagctattctttttaatattttaaacattattttaagtgcttgagagtttagcatctatgtattgcaccatgtgcacacatggtgttggaggaggtcagaagagggcacccattccctgagacaggagttacagacagttgcaaaccaccatacagagtcctctgcaagaggaacaaggactcttaatgaatgagccaactctccagccctcaaagctctttttgatgacttggtctatccccttaagtcagtggaagcctctgaagtacatacattagatccttttaagagctttcaacccaatgtagctggttgatgcagtttagccatgaacaaaatagctaccttagagatataaagtatggctcctctagatgtattagctatgccatgctaaaattttataggaatttagaatataatattactaataggataataggtatcaaaatatgagcattggaagtcagaataaaacgatgtcctcatcttccatgtgactcaggtaaagtacttcacatcccatgtcccgtccccctagatctggatgtacaacttgtggcaagatgctgcttcccacagactggcccaggtgtgattgccagctgctcaggagcagtggccacactcagttgtaggaccagatgctagacatctgtctcctattaaccaggatcaaaataaagccctgctcaagagctgacaatgtggaacatgtaacccaaacaaagatggccctgttgcctgtttagcaaagcatctaccacaggaacttcgatcttctcaacagctggagaaatcaagccctttcaatgtggccttttgctcctttgtctttttctctgaagctagactgccgttattttttcaactctccttttaagtcatttcctgctttagcctcccaaacagctgggactatgattatgcaccactactctcaacaacgatccccctttaaaattactatatgtttttttgtatgtgtatggtgttttgcttgcatataagtctgtgtaccatgtgcaagcctggtacccacagaggttaaaaaagggcattgtgagctaccatgtggtactgggaatggaaccttggtctttattattattattattattattattattattattattattattattattattttatttggtttttcaagacaaggtttctctttgtaacatccctgactgtccaggaactctctttgtagaccaggctggcctggaactcacagagatatgtctgcctctgcctcctaagtgctgggattaaaggcatgtgccaccacactcagcttagaacctttgttctttagaagatcagccagtgctcttaacctctgagccatctcttcagtcctgatcccaattttgttcatcagttactaaggctgatagaatgaaacacaacaggctgtgacttcacctcctgtggtggtcaacattacataatctagaatcttctgggaggcaggccttcagaaacacctgaagatagctcctgagatatctatgggagacagtcttgattgtctttttgttttttgagttttggggttttgggttttttgttgtttgttgttgttgttgttgttgtttttgtattttgagacagtgtctctctgtcctggaactcactctgtagaccaggctagacttgaactcacagagattcacctgcctctgccctgatgatcttaattgatgcaggaagacccatttgaactgtggggagaaccattccttgcttagggagcttgtgctgtataaagtgaaaaaagtgagctgaaatattattcatttactggtggtggacttaatgctactagctgttttgtgtgctccttgccttgaatttcccaccatgatggatttctcacagtgccttcaaccgtgagctaaaataaatccactcttcctgaagttggtattttattactgcaatggtagaaggaacatcctcccaatggctgatgcagttcaatagaaaggtggttactgttaactgattatgcaccaagagaacagagtggctcatcttttagttcctgtgtctctgtcttttagattttagttgttttagcaggaaaaaaattgagtaatgaaaatcactggggtaactactgtcttagttaagctttctattgctgtgatgaaacatcatgaccaaaagcaagttggagaggaaagggtttattttgcttacatttccccatcactattcatcatcaaaggaagttagggtaggagcctggaggcaggagctcatgcagaggccatggctgctgcttattgacttgctcagtcagtctgctttcttatagaatccaggattaccagtccatggatggcaccacccacaccaggctgggccctcccacatcaatctttaattaaaatgcctccataggcaagcttgtaaggcattttcttaattgagagtccctcttctcagatgactatagcttatgccaagctaacataaaaccagcaggcacaactacagtcaacaaaaacctattgtgtattttataagtaaatagaaggagaggagttggaaggctccaaaccaaagtaataaggaaatgggaatggcaattagtctgttttgataagtacacattgtatacaagtattgaaaatcaatgtactccattcttatttttaaacttcaacagagagtcagttaccctggtaattcagcaacaacaagcactttgctgtcaaacacctaaatatctctaattcataacttctcagaatgcaacacttgagatgaaaccctccagtcacagccatctatccacctagctttgagactgagcattcacacactttgtgtatcgcctgtgtcggtgctgttcacatggaactttaaaaagttcatcaagaagatttaagcactaataaataaagttttcgccgggtgttggtggcgcacagctttaatcccagcactcggcaggcagaggcaggcggatctctgtgagtttgaggccagcctggtctccagagtgagtgccaggataggctccaaagctacatagagaaaccctgtcttgaaaaaccaaataaataaacaaataaacaaataaataaataaatataaggtttccactaggtagggatgcagtatggagaatcatagatgatggcaatgtctacaatgttttcccaccctcatccccagaatcaatttcttgattgattgccccaatgaagaatatgtgttctgacagcatcaacagtagctctgaggaaggactcccttaactggctccagacagtctcaatttcatcccacagattctctagtatttggaactaactacatcccttcaatcactagtaccctccctcagctctccctacagatctctgtaactggagttcttgtgactcagtccccacgttaggagtcctaatgtggaaggcactgttttggtccccaggcttgtcttaattgctttccaattgctgtgaaaggcaacttataaaagagtttattagggcttacgattccaggggtgagtccatgaccatcatggtagaaagcacggcagcaggtactttaagtgctggagtaatagctgggagcttatacctgatctacaaataggaggaagggggggggcatgaactgggaatggtatgagcttttgaaacctcaaagcacacccctagtgacacacctcctgcaaaaggccacacctcttaatctttcccaaacaatcccaccatctggggaccaggctttcaaatatatgagcctatgggtgtcattctcatcaaactctacaaaatggttatcatttttgcatccctgcaatttgttgttaaaatgaggcacctgcacacgtgtatataatagtctgacacttagtaaagaaaggatctctcttcccctgtttggtaaatgtatctagtgacacagtccaagatagagccctgaaggaggcggcctgactggctttctgaagctaccaagcactgaactgaactcccggagcctttcttcacgtgtccagctctgaggttggacccttcttcctccccagttgttttctgagacccatatgagatttgtagtcacaccattcccacttcattctgccagcctctcactgctcttccaacatgttgagatatttgaaaattccgactctatcatccagtgttgttgttcctttatcttttcttttcttaagaaatcttcatgcgggctggagagatggctcagcgattgagagcactggctgcccttccagagctcctgagttcagttctgtgcaaccacatggtaactcacaactatctgtaatgagatctggtgccctcttctggtgttcaagcatacacgcataagtaagtaaatcttaaaaaagaaaaaaaaagtcttcatgcaagtcagagaagaaagaaaatgtttgaggaaaaggaagtaaaataatcagttcctggtttgggcatatgctgagatgcctgcacaaggaaggcttagtgtgtctaagcttgtcttaaaaggcagcatcatatagtctccgtgtctctccacttcaggcagagaagggatggagataggccctctcaggactaccttcactgaggtttcaaagtaagatgtgcttgacatctgtggtttaatcatacagtatgtgtcagtgtgcattacactgcaaacattgctggaacaatagaatgataaaaaattcaaagcttgctctatttcaggtgcttaactacctgagccatgggctattttgaccacattaacaattaagtggaccaacagcacacttttggaaagaaagattttgcttcaatgctgcatgggttttgggatgagacatctactcaccaatggcaggttaaaagagatgatttcccaaactctaccttaagtgtaccaatgaggggctggagagatggctcagaggttaagagcactggctgttcttccagaggtcctgagttcaattcccagaaaccacatggtggctcacaaccatctataatgagatctggtgccctcttctggtgtgcagatatacatggaagcagaatgttgtgtactaaataaataaaatcttaaaaaaaaaaaaagtgtaccaatgagtttaaatgacaactttcaggagcataggtaatttacaggcagctactccccggaagaagtctccctccagcaatgctaaccatacatttatccacagagagggaggaggcttgctgtggagcattcatttaggatgtgttacatttgtttatgctgtggaacatttgtttaatgattcaaagatgtactgtattcttttaggttgtatttgtttatctgtgaagctgtgttactgtgcctgtctaaaacacctgattggtctaacaaagagctgaatggcaaataaccaggtaggagaaaggataggcgaggctggcaggcagagagaataaataggagaaatctgagaagagaaaattgggaagaaaagaagaaggagaggagcacatcaggggccaaccacccagctacacagccagccctggagtaagaagaaaggtaaataaaatagagaaagataaaatcccagaggcaaaaggtagtcaggataatttaagctaagaaaagctggctagaaataaaccaagctaaggacaggcattcataagtaagaataagcctccctgtatttatttgggagctgggtagaaggccccctaaaaagcaaaaaagagtaagagtaaaaaaacaatcaactctagggcctaacaaactttgtggctttcccttctgtgaggaggtgttagctagcccaatcttatgagaaatcacagctgctttgcttttgagacagccatatcgtgctcggaagacagctccacagcactgctggtgctgtctctgatgagggtcaaaggggagtgtggacttgaattatttagacatctggcctaatccttcattcagtgagaaagacccagctcatgacagttaattcatgctacttggagtccaaaacagttataaagctacttcgaaatgtcctcaactatgcctaagagacctgtttttgacagatgtgctcatgtagtccagtcaatcggcatatggaatttttatgtacaagtgcctgcacaagtttcaccatgtaacttttattagcgctcccactagcatggggagacagatggcatacacattacactcagaagtatgctttgcaattggccttcctggcttgactgctgagtgctcattgtgcatgtgttcacatgcgtgtgtgtgtgtgtgtgtgtgtgtgtgtgtgtgtgtgtgtgtatgtgcgtgtgagagagagagagagagagagagagagacagagacagagacagagagagggagacagaaaagagagagatcaacagacaccagtccacatgtaggtgtgaggtttctaaagtccaatctagcccgcctagtgtccactgtggagccttcccttccctgctgagatctccttccctacttccttgctctttctttgattttccacctctggctttccatctcttgcatctaggccaaggctaggtaggtttagacccacgcaagtgtgtctaacccttgatttgtgagccacatgcagccaaagatagctcccagtgtggcccaacacaaacaggtaggtttacttagagcattgtgacattaggtgtacaattttcctttttatgacttcactgtaaggttcccagtcatgaactttgtagacaacaacaatcctgttgcttctccaaaaggttgcactcacaagcgggagataagcaagggaagaacacttccagaaggtgttctcttcatctctctagctctgtctctctccctgcccctctcctgacagtctgagttagcactgcctttccttgttcttggactgtgctacagtctgaacatagttggtccctccctaacccatgttggagtttaatccccattgtgagatatggagagaatttagctatggtgttaggggttgcccctttgagaggagtgcatagatctggaaggtcagcagatggagcctctcccactgaatattgatggctttgcaagaacaaagagctacatagagaaaccagaaagaatagtcaccagaaggatgggcctagatggtttagaagactaagttgaggaattgagcttcgataaaattattttgaagttaatttggaagaagaaatattcaatggtagtcaaaatatttggaatatatatatatatattctgagacagggtttctctgtgtagccctggctgtcctggaactcactctgtagaccaggttggtctcaaactcagagatccccctgcctctgcctctcaagtgctgggattaaaggcatgagccaccacctccaagaaaaacatttgaaaatcttttttcttttttttttttttggtttttcttaacaaagaaggattgaattaaatctaacaagtgtcaattacagaaattaggtcagattacagaaattaaaccagtgctagatagattaaatggaaaggctatgacttttacaaagaaactaaagtgaatgagaagactgaacgtataataaaggcaacactttacatttgaggaagagatctcattcagtaaatggcattgatcaggcatggaagttcatgcctgtaaccccagggccatagggagaagacagcaggctacctagggcttgctggccagacaatctagccaaaatggtgagccttaaattcagtgagagaccctgcctcaaagaaatgattgaagaaagacattctcctacaggggcacctgcaaacacacctgcacaaaagtcaatatactacacacaaaactcaaaaataagcaagcggattttagaacaactaccacctaactgaaggagaaaattgactttctgtaaagcctagcatggggaggtgtgtctcataatgacgtaagaacaagatcatctctttgaccaaataaaactgaaaactcctgtgttacacaaacaaggaaatcaaaaggcgatttgggacaaagtattggtatttatatgacaacacattctggcaaagaaatccgcctccatcaaaagaaggtaggttgagaaggtgagtggacaattcacaaagaaaaaaatatatatgtattcaaactcaacatcagttaaggagttaattattaattaatgttaataattcattaccgctagttaattaaaacttgacttttgtttttcctatcacaacacaagtactttaacaggatatagtgtacaacattggcaaggatgtagaagaccatggattacgaggcagaggtagataggttgggacagagtccattgctcctgaagctattggacatctgtcagtcttggtcaatccagctggagttcttgacagcataggaagacagacagcaggaaagcaagggagaaagatttgggaagatgctcagaacacacgtagtttctgatgccatgcatctaacatctactttctaattcctcctcattcgtgtttttgatatttattgggtacccaaggatcaactctaagaactcagtgaccattaattctggtttcttttaaaaagcattttcacttttagtgtttagagcaggaaacagtgtagtcatttaaatgagctgaggcatctacttatgtacaatgtgcttggcaaagactcctgctggtggcccaggtcgggaaacaggagtgcatgggtctcagttcactagctatggggttttggaaagttgtttaatagttttcagtttgtttgctatacatttctattactgtaactaggcacaatcacctttagtgtgattgtgaggattaagtaaaaatgtgtacgttaggccccatgacttggtacacacttcttaaaagcaggtttccttccttctagggagaactagctgtgtggtaagttatctcaccctctgtatctccgtatcactgtgtttcccagcaggtcctgggtttcaaaatccaaagccttgataatctctgatgaagggttcttggcaataataataataataattttcatttttaaatgagctgtttcctatttctgtgtgtctccaggctgagagagaagctctggcttctggtggaatactgatgtctaatccagaatggcccctgtccagctccccagctgtgtaggataatgtgttatggctgcataaaaatggaagagtatgtgaccccatctggtgaggaaactgagaacaaaagatgggcaaacaggaaccagcaagacactggtctaaagggctactaaatgctcatggctgtcagaatttggggattacctgtagtcaccacattaaagacaggacaattgggtaaaaagtacacatacagaaaggggcttggtggagacttcactgtcccatctgacactggtaagccacgttaagtcacacagcttctgacacggctgctgctgtgctgcatttccctttaagaggtaaaatagaaaggttacttaaaatgaagagatgcttccgaaattggaggtggaaagtggagatcactgctgcccaacttcaatcttcctggcaggtgcattagaagtacctgcggagtttgttaaatacagagaccagagcctgatgccttttgcccatgtgggtcactgtgacaaagtactatgggcaggctggcttatcaacagcaggaatctccaaagttctgaagtcagggcaccagcatctgggttctggtgaggacttcagattgctatcctctcactgtattcccatgtggtgggaaggggtctagagggctccctggaggagtccctttttaaagggcactgctcccattcatgagtgcttcccccttattatctaatcatgcccctgtgttccaccttctaatcttgttacatttacactagatgtcttcctttttaaaaatacttttattatcagctgggcattggtggctcacgcctttaatcccagtactcgagaggcagagacagacggatctcttgtgagttcgaggccagcctgatctacagagcgagttccaggtcagcctccaaagcaattcagagaaaccctgtctcgaaaaacaaaaaaaacaaaaacaaacaaacaaacaaaaaacaacaaaaaaaccaaccaaacaaaaaacttttattatcatttatttatatgtatgtgcatatgtctgcatatgaggaggccagaggggtgtcagatcccctggagctggagttacggttctaagctgcctgatatggatgctgggaatcaaacttgggtcctgggcaagagcagtatgggctcttaaccactaagccgtttctcctgcatccactaggatttcaacatgtgaatttggggatggcacgcagccagcctgttgtccaggagcaggaccagagactttcagaaaaactccttggtgctgcggtgcagggctgggacagccaagagtgctatcttgtgtaatttccagatggctggggaacgaagcctgaagactgattagttctcaagagtatgcagaccaggtttctttagttttcagaacatgaaagtaattatcccaatctctcttgtcttagctaaggctggagcagacacaacttactataataggggtgcagataacagtactgtatactggtgaaacattagggaaatctaggaaacaggaaggaaggaaacccaggctttacactccatattcttttgtgatgatgatgatgatggtgtgtgtgtgtgtgtgtgtgtgtgtgtgtgtgtatgcatagtgtaggggagcatgtgccattgtagtcatgtcagggtatgagtgtagaggtcagaggataaatttattgagtcagttctctccttcctcttttccggggctctgtggttggatcccagtctgctaggattatgtaacaatagccttttcacacagagccttctcacctgctctttgcccagatgttctgaggtaattggtttggggtggtctgggaacaagattaagttttcaaagcccagtaacttgctaccagagttgagaacggcttcattagctcattattgtcaattttggctacacataggaagcacttggagagctttttgtttgtttgtttgttttgtttttgggttttttgtttgtttgtttgtttgtttgtttgtttgagacagggtttctctgtattgttttggagcctgtccttgaccaggctggctttgaactcacagagatccatctgcctctgcctcccgagtgctgggactaaaggcatgcacccccaatgcctggccctgttagaaagcttttaaaaaaggatgctgtcttagggtttctattgctctgaagagacaccatgacagcaactctcataaaggaaaacatttaattggggcttgcttacacttcagaggtttagtccattatttagtttattagaagcgtggtggctgcaggcagacatggtgctggagagatagttgagagctctacatctggatccctaggcagcaggcagagagagaggccctgggcctggctttggcatttgaaatcccaaagcccacctccagttacaacctttctccaacaagactacacctcctaatgttacccactcagcactcatacaggagtctctgggggtcattcttattcaaatatccacagatgctctgatcccaccccagagttcaatttaatcataatgggatacagcttggacatccagagttaagtatccatggtgattttgatatgtctagtatataaacaaatttgagaacaattgttgaggccagagaagtagctaggttcccctcttaattatctaccccaaattccctgggctagcatcagtatcaccgagaaatctttaagaaaagcagttctctgcttgtggtggtggtgctcacctttaatcccagcactcgggaggcagagacagctggaactctgagttcgaggatagcctagttacagagggagttccaggacagcagagctacacagagaaaccctgtcttgaacacccccttaccctccccccaaaaaaagaagaaatgcagttctctggatgcacacaagatccagtgcagcagcacacaccctgggctatccaaggcctccagagcccctgatctccctgtggttagtagtagatttcacttcccacagttgttcatggtccagcttgtctcctcccagagcctagccagttcaagaatcaagaaccacaggcccctggacattggacaatgtcaaatctcccagatgaggggccaactttcttagtgtgtctgaattttttttaattagttcaaattagaaacaagcttgtttcacatgtcaaccccttctccttctccctcttccttccctcccttcagcccccacccccagtctcccacctcatccccctctgcttcccagggagggtaaggccctccatgggggtttctcaaagtccgtatcatcctggggagggcctaggccctccccatgtgtccaggctgagcgagcatccctccgtgtgggatgggctctcaaagtcccttcttactccaggaataaatactgatccactaccaggggccccatagaatgccgaggcctcctcattgacatccacttcaggggtctggatcagtcccgtgctggcctcccagacatcagtctggggtccatgtgtctgaaattttatataacccgagaagatattttgttgtctggaaactgctggtgtcaaactggacgagtctgctaggggatagcagctgcatttctgctcaacaaaaccaaatgaggaagggagggcaaaggcaggggaggcaccactcagagcaaacactgtccttggctgtctaggatgtaaaactaacatgaagtatggggagaacggagcaaaggcacgtgtacacagctgcagaggccagagagggtgttgtttggggtgggtttttggatatgggtgccttcagttttgtcacacagatcaaacgcatctttccaagaaaatcctgtttgttgtttttgagaccaaatctcactctagctcagactatcctccaatttctagcaatcctactgcttcagcctccctagtgtttggattgtagatcttagtcaccaacctagtccaggactgcgtgatgtaaaataataatagtaattgcagaggtgtgtgtgtgtgtgtgtgtgtgtgtgtgtgtgtgtgtgtgtgtgtggatgtcagagtaaaaccctagcatatgggtcctggggatgtcagggttagcagcaaatgtctttcccctttgagccatctccccggctttcttgataagaaaacaaacacaagtgtgtactgtattaaaccctggaagaaaatctgcatggacactttaaggctcaacagagtagaaaaacacacattggtggtatcaagtcacttacacaaaaaaagacccgcaggaccgttcactttcatatatgtagtttattttaatttagtccagcccttgctgaggatgcccaaggtgtagatggcattgaacttgatgtcaagtaggtcactttctagcagggagagaggtgagcaagtgtatttctgttctatgtgctgatttccttgtaagcagattccaggagagttacagagggtgagggtgatgtcatcagtggaggctggccctgggcctggttttgcagaggaaggaaaggcgttttgcatttgcatcaatccatttcctgttgctgtaacagaatacatggaacaggtaagcagtaaagaagtttgttggactggagagatgacttagtggttaagagcattggctgttctagaggacctgggctcaactcccagtacccacatggtagctcacagctgtctttaactctagttccaggggatccgatacctcatgcacataaaataaagttaaacaatttttaaaaagaagtgtatttagtccagttttcacagaaagccagaagtttgtcaccacggttcatgatagaagagcagaggtgaaggtggcagggacgaatcaggctggccttgttctgtgacaacccctcttgggagaaaggcattaagctgtctgtgagggcagcatccccatgacctaattacccttcaaaagccatgccacagctgagtgctgccacactggggactcattttctattgatctggaaggagacaagcctacacagaaaccatagcactannnnnnnnnnnnnnnnnnnnnnnnnnnnnnnnnnnnnnnnnnnnnnnnnnnnnnnnnnnnnnnnnnnnnnnnnnnnnnnnnnnnnnnnnnnnnnnnnnnnncaacactgtgggcttctggctgctcagtggtgctaatggggtaatcatggagctggaagcagcaatctctgtaatgagattacagagttggtggagatgaggggcccttctatatgcagctaagcaacttgaactttagcatacttatctgtcatggccaaacctagggatcgccaaaattagctgctggcatctctaaaataataaagcaatatcaagtcccaggactcatcttagaagcactaattcagtggtttgtggtggtccagagggggaaaggaaaatagaacagaggccaggaaaatctaagtaattcagctggtcccctgaagcagctagagcttagtgcaatggactatgggatggctaggtccctccatttcaacattaaaaactcatttaagctttatttagagaaggcaaatgagggtggcccttgggcagactatcggtggttcatgttggaggtggtttgctgatatacattggactgtgagagttaccaatgccttctggggtttgattgggactccacccatgtgtaaagttcatcttgtgctgtaacattcatcccaagtagtgacaagattggaaacaaatgaagtctggtcatacttactgctatactaagtacttgtatgggttgctcttagaatttgctaatgataaatgtttaaaatgtactttgtacagaaaactaacaggcagagatttgtctgagtgaagacaagattggtcaaggctggatggcagtcactaatagtggatgtctactacaaataagcaaatcagcaaaggggtataaagtagaccaaatccttgagccagaaaaaataattctcaggaagttctgctaggaagcgctggcgttagacacatggcctttcattgccttgggaaggagtcaaccatagattttctgtctgtcttgcttgggaccatatagttggtatttgagctcttggcccacatcaaacataggaaacctataaaagctgggttttctccaaagtatatgttttatgttgagagctgagagatatgaaatgaataatataagctatcatagagtctcatcactcaactttttatgtcatgatgttgaagactgttttccaaaactgtcagtaaaatgtctcccacaagcggtttttacctcattcttttgatactcctcctcttgagagttaggtctcctttacaggttaaatcatgttttccaggaatttctatgtggaagcagtaactcacagtacttcggtgtgtgatcttagtaggaaaataggatcatttttgtttgtttttgtacacagggtttctcttcacagccctggctgtcctggaactcactctggccagtctcaccagactggcctcaaactctcagagatccacctgcttctgcctccaaagtactgggattagaggcgtgcgccatcacacctggctggaggagaggatcttaaagaggatttttatggaggtaatgcagttggagagtcctgataaatagtggaggcttgaacacagacaaaaacagagggaagatgatgttcccagacacagagaggaaacaatcacttatgaaccaaggagaggggcctgaaacagaagcttccctcacaccccaggaggagccagctctgcctatgccagttcctgagacatcacatttctgttgtttagcttcctagtttgtgttagtttttacaacagccctaactctcctacagttctggaattctttgaaaattgtggaagtgacactgtgtgtcttcctgggctaggccataaaaggcaacagagctaccacggattgtattgagagaccaggcttccaggaagctcaagccacttgcaaaggtcacattttggtgccctgccagcatcccaggggattggaagaatcaactgctagagctgtgaaccaagacagctacagatgattcctgctcctgtgtgggtcagcttagcctgacctgaacctgcctacggtctaattagttattaaaaagataagagacagttttgagtctttaaagtgtgctcatttttaaagtagtgttcttatttttgtaggattacttttattgcagttctactgatcatatgaggctggagagctagcccagtgtttaagagtctgttgctctcacagagcactcatattgggtagctcacaactgtctgtcactccagctttcggggatctgacacctcttttgacttctacaggcactcacatgcatgtgtgcctatgtggtgcatgcacacacatgaataaaaattaaaaacataaaagtctattttataactatttcaataaaaacactactgatcataacttctcctttataaattctgtgtagcaaagccttttcttattgttcttgatgaatttttccattctctgaaaagtaaagatcttctatattccaagatttagtaagtagttcctttggtatttgaatgcagagtgtcccccatagctttgggcatttggacacttgatccccagttaatggcactgttcagggaggtttaggtggtaaggccttgctggaggaagtatatcagagggggtgggtttgagaattaaaaagccccatctgtttcatttgctctcaccaattaacagttggccactcaagacttgagctcttggcttcctgttcctgccaccatgcctgaggcttgttgccatacttgcaggacaccatcatggactcttatctttctggagccaaaataaattctcttggtcttagaattttaccataacagaaaggtcaccagtgtagctcctatatattttttcattataaagggctgtatcattgaatatatactttcaactaaagtattgcagccagacatgaaaagaggaaaaggttctcaaattttaaaaattcttcccgtggtagtttgagtaagactgtcccccatagatatatttatttgaatgcttggtccaaagttggtggaactttttgggaagtattaggaggtgtggccttgttgaaggcgtgtctctggagatgggccattggtattttgccatgggtattgggtcttgtgggatatttgttttgtacactgtgtgaggatatattgctgtgattggtgtaataaaaagctgaacagccaatagctaggcaggaggtataagcgggatttctggggaaagaaagaaagaggaggagaaatctaggcatgcaggagaagcaaggagaagaaacaggaggtacaagataggagagaggtaacaccacacaataaaacatagattaatacaaatgtgttaatttaagagctagttaggatcaagctggaactgtaggctaagctttcataattactaaggcggccttctgttattatttggaaactggcaggacagaaaaaaaactcattacagattcccctggaactggagttacagatagttgtgagctgccatgtgggtgctgggaatcgaacccgggtcctctggaagggcaatcagtgttcttatccagtgagccacctctccagctgcccccatcacttctaaaggatcattagtttagtacatctgggatttattttggcatatgggctaaacatttcatttttgtacctcataaaagcagatcaactgttctgtaccagctgctgaataattcctaacttttgttctaatctgtgagccactatgaagtcatacactgagttgtccatcatcacaaagcaaggcccatttctggactttacagtttgcacttgactttagttttagatggggcttcccataatatctgataaaggagttccacactctgtcattctttttggaaactttcatagttgtcctcacacacttattttccacacaaacattgaatacagctttttaagctatcataattgctattccaatagcataaactcaggaatgtagctaagaaatatctatgcctgttaatagttatcattgttgtttgcaagtgtcattcatatatctgtgtttgtttcataccagcaaagccttagacgcagcatgccaggaaatatactcacttcataatcctttattaattgttggtggatacagagatggttaatatatatctttcacaaacaggtcacctttattctgcatcaaaacatcattgggaattagatgcagataaaagcgagagtaattttaaaggcacacagtttggtaagttctgtgtatgcacccatgacattctcatgggtcctggtgataaacatacccctcagtcccaaatttcccacgtgtccccatacattctagcattccattctcctgtactaccatttccaggcaactggtaacctactttcactctagtttgctttttctggaaatttaacatggattttttaaaaatagaatgtactgtcttgtttaattttctcttgctgtgaagagataccatgagcaaagtaatttatagaagagtttatggatggggacttacggtttattgggattagagtccatgatcaccatgctgggaagcatggcagcagccaggcaggcatggcactggagcagtagctgagagcttgcatcttaagttcaaataggaggcacacagagaatcaggaatgtcatgggcttttgaaatctcaaagccaaccccccagagacacacctcctccagcaaagccacacctcctattcattccaagggtcttagcccaaccacagaaggctgagctgggtcccaggaagggtaagtgctgctcacccattccccagcctcccaggatactggagtcaatcagacacagcagggagtctagtcaagcaggaactcatttattgctccacagcaagcatcttttaaagcaaaacaaacacagagtgggaaaacagctagccaatggttttaaaggtcagcctatcagctgcctagacatcctatgctttacctagtgaacatgagcagttcacacagtgacctcatttggtttgatcttggtaaccaatcaccgttttttgtaaacatctcaggattcactctcctgacttcccctcatcaccatgtttaactggctcttgtgcccttcaccttcccaaacagttttaccaaatggatccaagcattcaaatatatgagcctgtaggggtcattattattcaaaccaacacattctactccctgcccccccataggcttgtagccatatcataatgcaaaatatacttaggacaattcaaaagtccccataggctttcacagtctcaacactgtttcacagtccagttttttctgagactcaaagaaatctcccaattgtaaacccctgtaaaagcaaaaatcacactgcatacttccatatacattagcattttagaaagagcatacatagcataaaagaaagaaaaggggcatagtgaggaaatactggacttctccttccctgatatacatcattaatttaatctttgcttttaaaagctgggaacagtaccctttcctccaccccttatacctttactttgtcacaattattatctttaacaaattatatcattcatgtcatttatttcttctagtgtcctgagaagactcccactttttttctgatgtatcccaagtgtccagaacctgcctcgaggtacacaatacatctgttgagtgaatgggaagacccttccctctagcaaacaccaagtcatttaactgcatcatgttgctagctccagatcagtttctcaagctagcaaagaaacatttgaaaatgttacgttgtattggttcctctctggaagggtcacaacacgttaacaaatccagcagctccaaaggctgcagtcacccctgctttctccatttacttaagacttcccagcttttcctggccaaggaacattgaatacacaacagtgtggtacagttcttaccagtattgcatgacacctggggatattttctattccattctactcttttttatgtattctatttttcctgtcccattcagttctctttcaatattgaccaaacccaatatttcatgaggtgggattttgtccatgactgttgttttggggagagtccttcagactaccatcaaactcaacccatctattatggtacttatcccattgtttccaatttagttcctttaaaaaaaaatcagtgcaattaaccttcaagaatccagttgctaatcattctggtaatttatgacaaaattctagaataaatggttcaaaggaaatagatgctaagatccaacctctgcattgctaaattattttctaaaaggtttgcacccctgtctacctacacagacaaatggaattcctccaacatactcatcttcctatgtaaagttctacttgctagagttttcttttccccctatttttcatgattctaatatttgttctgactttttttgtaaattttgcatccaggtctttttccagctcttttctgctctggaagagagccagctaaggggctctgtatacttgtagtggaaggtattgtgatcctttctgaggacagttcatgtttgtacttgactgcaaccaacagcctctagctttgtgagggaacatagaataaagtgaagtgctgtctggagggtaaacagagggtatagagaggctagaagatgggttgtttattttctctttttttttgaattttttatttgaattagaaacaagattgtcttacatgacaatcccagttccctctccctcccatcctcccctaccacccccctccccaactaaaaccctacctatcatatatcctttctgcttgaagatgggctttttaaaaatcatctattgatctatatatcatatctatctaccatctatcaatctatcatatgtatcatctatctctatctctcatctatctctatcgtctatcatttatctatcatctatctttgtctatcatctatatatcatttatctatcaatatatcatctacctacctatctatatctaattttatgaaaggctttattatgacctcataagcatccttttcactttcagtatgtcttgtagacaaatgaaactcctaaatcactttaaaaagccttgcctttcctaaggagaacaatttctcttcacagcccctgggtgaactatacatggaaaataaataaatccactctttctagacatagtacaggccgagtattctaaatccagaaatacaaagtctgaaatgctcaaacatctgaaccacattgaaccactcacttgccacagcaatggaaaattccacacctgacctcttgtggcaggtcacagtcaaaacacaagcaaatcagaaatactgtgtgagtccaccttccagctgcataggtgcatgtgaaatacagatgggttttgtgtttaagctggctcctagcctcaagatgttttctctaacatatgtaaatattctaaaatgtgaaaaatagaaatattaaaaacttctggtcccaaggagttttaagaaaaaagttactcagcctgcaacctaaaaaaattatttgttattattatgtgtgcatacacatgttcaggtgccctgaggtcagaggacaactatataaagccaacctgtaatctaatctctcaattctttctatgtaagaactaaatatactcagtctgcttccaggaaactgagataccacatcagaacagagctgcagctctgttttctagagggggttgtcttaaaagcagccctcagactttggagctatgctcatgatgaaaatagcatgtgatcgccagaaaaagggttcagtgggtaaaggcacctgcaccgagactgaagacctgagttcattccccaagacctacaaaatgaaaggaaagaagtgactactgaaagttgtcttctgaccttcacatggaagccattgcatgcccatgccctcacaatgcacatatgtctgcaaataaaatgcactaaaactatttttaataataaaataagtaacacttgaacatctgagttaggggcacaaaatgcaaatgtgtgtcacttggaaccaccaagcatgcctgagtggtgcccttaggagctagggctagtccgacttaattgtggtagtgaaaattcctgactcagtgtaaataatttcactgttataaaacagatttagacctttgttgatatcttgggttcctgaggatttctgagtctggctcatgctagtttaaaaagctcttatgcaagcaagacctagcgggtgaggtctggaggctactaagacagtctttgcaaagaaagctcaccttcctccagcacaccaaaaagacccaccattagaaaccagtgtagaacattgtgtccgtggaattttccaggttaaaattcacctgtgcacgggtgatacctaccacttcaccagtggaacttggccttgccttgaacatattttcagattctttgcagccctgaagaaacagttgggggtgggtctggcattcctgttaccgagagctagcagttcccagacaccatttgctcagtcatcacagggaggttgccatggcttggaattagcttagtgttaagtgttacattgtaacactattacactgtagagaatgaggaagagggatgtcagaagctgtgttctctcaggtacaaacctcgaagggctgggctgctcggatggatggctctggctgcaaccccaggaatacagcttccaacagagggaggccacagatgaccaggaagaaaagttagggtcatctgatcccctgagaaatagagcaggcaagaaggtgtaaaatgggatgtagtgaggatgttctcagatttcctgaaaaagaatctggagggattgtaaacgtatcttttactgaagatgcttcaaagagtctaagcctccaggtctcaaaactgaaagctgagctttcagatccgcaaaggtgagtattcaggagtatataaagtagaaaccagcttcttgcactgtcagcacagtggggttcctttgagaatttcaggaatggaggatgcgagggaatgcatatgtcacaatgtttactggatgtctgtgacatgaagagtgctacaaaaagcagagggaaggttagagacatggacagagaaataggaaacaactctaatagccatcacagatgaactaataaacagcataggaagtatatgtgcacagtagattaccaatctgcctttaaaaagtcctcatctatgctaccacatctctcatggatgaacctcaaagaaattaagctgaacgcagtaagtcagacacaaaagatgatcatgtataatctcacttatgtgatatatctggaatatccaaatccacacagaaagtaacagtggttgtcaagggctagtgcctgtacctgtgcgtgtgaagtgtgaatgtgtgtgtgtgtgtgtgtgtgcgtgcgtgcgtgcgtgcgtgcgtgtgtgtgtgtgtaagtgtgtgcgtgcactcacgtgcatgcgggtgagtagggggaatggagagttattttttcatgggcacatatttaagtttgccacgatgaaaacattctgaaagtggtttggggtaatggttgcttagcaacacaaactctaatgcccctggaacagtactttgaaaacaggacagtaaactcttcgtgtatttcaaccctcctcaagaccacaacaagcaaataacaaatgagagggcccaagatttgacatcagaaatagaggaatgaagatcatgcagccacaggaagggcagtccaagatgagaaaccggggtgcactgcagcaggctcaggtgctcctccatcacgtttggctaccagaaggagaaagccttccatttaggaatagtggtttcttattacttggctacttaggcacaaagcagtacctttgttgtgttttgaggcaggaggcagggtttctctgtgcagacctggctgtcctggtgtcatgtagcccattgagtaggcctcaaaatcataaagacttgcctgactccacctccccagtgctgggattaaaggccaccataaccaaagcactaacttaatgcttgactacagaatgactcttggaaggagggacactgccccagaggtcccagagtttaagaaatgatcacattctggttcagagacaaaccaaggagtcttttgtttgtctttgggtttctgttgctgtcataaaacatgagacaagaccaaaagcaacttaggaaagagagggtttatttctgcgtagagttccacatctcagtctatccttgaagcaagtcaggggaggaattcaaggcaggaaaccagggcaggaactgaagcagaagccatggaggagtgctgcttactggcttgctcctcatggcttgcttagcctgattgcttatggcacccaggacctccagcccaggtgtggcaccacccacagagggctgtgccctcccatatcagtcagtgaggaaaacacagtacaggctgtgtctacaggccaatctggtaggggcattttctcagttgaggtcccctctgccaaaatgactctagcttgcgtcaagttgacataaaactagccagcacatattgattcttaccttctgagtttacatagccaagtttcacctcaaaagaatcttccaggcctgtgtcaaaggcaaagagttgaggcagggcctccttcctgaaggtggtgccaaatttgttacctcagctctagggttcaggccatggacccaaacagcctgtagcgatgaaactgataaacctaaagcccaaggaaacaactgtgtgcgggcgcagtccctgcccctcagaggatagtttgagaaagactcatagatctgaggcctgattcactctgcaccttctgctcccaggatttctggccaccaaggtggcctcaggtgcccaggccaacccgagggacagctgggctccacaccgccgccagggggcagctccgccgcgctcccacatagccagcaactttcttggtacctgcgtatggtggaggggggagtcacagttgataccgagtgacagtcctgcctgcctctggtaaaaatttctgccccacccccagtactagcttgaggggggatgagatagagatttaccagtcctggaaaaagccagggctccaggagacccagagctggggaacagggaggcagaaagaggatgcgcgagcacggattgggtttccatgctgggaaatcgcaggacgagaaacagctaagggactcagagtaacaggtactttaactaaagcaaacaaaacaggtggagcgcccaaaggtggagctttggtgaagcttacccaaatctctgttaacgtatttcgtatttcgtccctacagcgatcctagtgggttgaggctctctgacaaatccccacgttttcccgagtggcctgaaagtccagggaatagccccttaattaaacttttggggacagacttgggggcgattttacaaacagaacgcaaactctcatttcccatacccttccagaacagacaagttgaagacgctgcaaatcttgagtagaaagatggctgtaattgatcctctaacgttattaatagcttgcgaacaattcttcctgtatttcatcgtcaaatgcattgccacacagcaacactcagcgctgcgaaaaccatggtgtttatttggatatccgccgagtactcacacaacttaaacgttcgatgtaaaagtggacatcttggtaaggactcttgtctgcatcaacaaagcactcgctgcctgattaacggtgttgattaatgttggcgcaggttattacaataattagatggtccagccatacatcaaacggagaggcaatgaaaaataacgcgttcagaccatgaggcattctcgtagctctttcaaagatcactaatagactttacgggccatttacaagtggaactggtggttagccattggagggaaccaaacctgatttgaaaagaagtcttggatggggcaagagttcattttttagactctgtgatgaataccagttggaacaagtcgtttcagaaagtaggaaagtacttggttgataaaatgacatacaaaagagtccttgagattgttcctcaagatagccattgaatttttactcagttcttggcaaatgacctttttaaccagaaagttaaaacttctaaggcagcgtttcccctttgaaatagaacatctcagcaaatgcaaacatttagaaagccaggctatgagaatgaattcgagttacacaattattcggatgttccaccagtcaaaacaattagtttagctggtgatgagcacgggtatccttaaaacagaattatacttgcattattcctattagcttgtcacctggaagaaaaatgaactgagtggagttgattcccatatttatgttaaaaaattcgtttcttttctctaagagggtaaaaaaatttaatgtattttccaaaacaatataaaaagttgacctcaaagtaatctttgctttgtcttttccagcaccgatcctgcctgagcagcattgtgtatatgttataataattccagtatagagagttccatgaaaccccaccagagcagatcttttactgaaaaacatagcgcccctttttctaacatggcaacagttttttgatgctcttagatacaatctctctctctctccctctctctctctctctctctctctctctctctctctctctctgtgtgtgtgtgtgtgtgtgtgtgtgtgtttgagttttcactaaaattttctatttcttttcctcattcaaccattgctctattcccatggaatttgcgagatcctctcattagagtggcttagtttagctgtcaagtctctagggcattcaattgcagataaatgactaaaacgccagcctaaccgcatttttattaacagatggcggaaaacaaacgtctttggagaagaaccgaaggaaaagggttaaagggtcaataaacaattattaccgtgcttaaaacgggggagatttctcatcagattccacaggcagaggctggcccagtccaggggagctgggacaccccaccagactcccccgctcagtattccagggaccaccacacacagagtaagttgtcccacagcgcttctgatgttagggttgaggactaaatccggagaagctggctggggactcgaactcgtgcaaccttcggatgcgaattggtgctggctagggcgtgatacaagatatccgagaccttggcaagaaatagcaatagcggggtccagtgtccaactcttgctgccacccctcctgcgggtgaactttctctccctgtacgttgattcccttgcctttctttcccttccccaggccgcgctctgacgtgcacaccatgtgacaggcccccttctgctataagctcagacaaggtccgccctcttctggactcagccctggcctcgccgagctcggttcctannnnnnnnnnnnnnnnnnnnnnnnnnnnnnnnnnnnnnnnnnnnnnnnnnnnnnnnnnnnnnnnnnnnnnnnnnnnnnnnnnnnnnnnnnnnnnnnnnnnnnnnnnnnnnnnnnnnnnnnnnnnnnnnnnnnnnnnnnnnnnnnnnnnnnnnnnnnnnnnnnnnnnnnnnnnnnnnnnnnnnnnnnnnnnnnnnnnnnnnnnnnnnnnnnnnnnnnnnnnnnnnnnnnnnnnnnnnnnnnnnnnnnnnnnnnnnnnnnnnnnnnnnnnnnnnnnnnnnnnnnnnnnnnnnnnnnnnnnnnnnnnnnnnnnnnnnnnnnnnnnnnnnnnnnnnnnnnnnnnnnnnnnnnnnnnnnnnnnnnnnnnnnnnnnnnnnnnnnnnnnnnnnnnnnnnnnnnnnnnnnnnnnnnnnnnnnnnnnnnnnnnnnnnnnnnnnnnnnnnnnnnnnnnnnnnnnnnnnnnnnnnnnnnnnnnnnnnnnnnnnnnnnnnnnnnnnnnnnnnnnnnnnnnnnnnnnnnnnnnnnnnnnnnnnnnnnnnnnnnnnnnnnnnnnnnnnnnnnnnnnnnnnnnnnnnnnnnnnnnnnnnnnnnnnnnnnnnnnnnnnnnnnnnnnnnnnnnnnnnnnnnnnnnnnnnnnnnnnnnnnnnnnnnnnnnnnnnnnnnnnnnnnnnnnnnnnnnnnnnnnnnnnnnnnnnnnnnnnnnnnnnnnnnnnnnnnnnnnnnnnnnnnnnnnnnnnnnnnnnnnnnnnnnnnnnnnnnnnnnnnnnnnnnnnnnnnnnnnnnnnnnnnnnnnnnnnnnnnnnnnnnnnnnnnnnnnnnnnnnnnnnnnnnnnnnnnnnnnnnnnnnnnnnnnnnnnnnnnnnnnnnnnnnnnnnnnnnnnnnnnnnnnnnnnnnnnnnnnnnnnnnnnnnnnnnnnnnnnnnnnnnnnnnnnnnnnnnnnnnnnnnnnnnnnnnnnnnnnnnnnnnnnnnnnnnnnnnnnnnnnnnnnnnnnnnnnnnnnnnnnnnnnnnnnnnnnnnnnnnnnnnnnnnnnnnnnnnnnnnnnnnnnnnnnnnnnnnnnnnnnnnnnnnnnnnnnnnnnnnnnnnnnnnnnnnnnnnnnnnnnnnnnnnnnnnnnnnnnnnnnnnnnnnnnnnnnnnnnnnnnnnnnnnnnnnnnnnnnnnnnnnnnnnnnnnnnnnnnnnnnnnnnnnnnnnnnnnnnnnnnnnnnnnnnnnnnnnnnnnnnnnnnnnnnnnnnnnnnnnnnnnnnnnnnnnnnnnnnnnnnnnnnnnnnnnnnnnnnnnnnnnnnnnnnnnnnnnnnnnnnnnnnnnnnnnnnnnnnnnnnnnnnnnnnnnnnnnnnnnnnnnnnnnnnnnnnnnnnnnnnnnnnnnnnnnnnnnnnnnnnnnnnnnnnnnnnnnnnnnnnnnnnnnnnnnnnnnnnnnnnnnnnnnnnnnnnnnnnnnnnnnnnnnnnnnnnnnnnnnnnnnnnnnnnnnnnnnnnnnnnnnnnnnnnnnnnnnnnnnnnnnnnnnnnnnnnnnnnnnnnnnnnnnnnnnnnnnnnnnnnnnnnnnnnnnnnnnnnnnnnnnnnnnnnnnnnnnnnnctttactgctaggatttccaattgttagaaacgccgttagcgcgcgtgaaaaagcgaaggtaggactcccggctcttttctgcggatgggtggttggttttgttcgcccctcccggccctcggcgacctcgcgcgcccattttcgccgcttcggattcttggaccggactgtgttgggcaccagctggggcacagcgctattgctattggaggtccctctatttatgcaaactcgccctgtgctgcaacccagacttggggtgggaaggaaggggttgttaggagaatcgccctgttttggcactagggcttcttcgacttttgacaaattgagaaaaacaaaacaaaacaaaacaaaacaaccaaaaccatcaatactaagcctttttgaggtatagagattctcaggtccaggagtttttttttttttttaagtcaataatgtttatataaagctcatacaaaaccagtaaagggctccaaaaatgcctttatttgctcacactagtttggcgtactttttcatggaaaggaaaaaaattgattaacgtgtttacacaagaaacaagtcaaaatttattatttcttattttaacctgtgttttgtatcataatggacatgcggaatttttattttgtacttactgcatattctttacaaggagtattgtaaattttactggcgattattattgtactattctaatgtaagatttttacacttttttcagaaataaaattcttaattttcaaagaaaagctaactaagtaattggctgaattgtccttgtcttagttttttttttttctgctaaggaaaaaaaaacttatagattataagtccaaactcagaacaaaatctacttaaatattacttccaaagaaagcttaacataaccacgatggcacaatgtcataaattttgtttaaactttccaaatcagaaccatggcatatcagaacttatttttcagtgactgcaaatgaaagtattactttgctagatgtttccaaggttaagccttctccatcttaaagatcaatgagacatttttaaagttgaagttgcagtcaccctaaggtgatttaataggaatgtatgatttaatttttaaactctccagttaatttctgcttactttccagcacaatgatgcacacaaaatatgctcaaacgtggtgttaaactgtaatgaaagtaacacaggcagaggccgtttctagtttaaaattttaacagcaaaaagagatgcgtagattatctatttaaagtgttcaaagtcccagataagcaaatatttgcacttacaacatgaattgtatgtgaaagttctagcatttaagataaaagtgagtccaggaatcgcacaaatgagttttgaatccaaaggcaaatgtactgaaattttagctgacatgaataacctaagactaagaaaacttgtcatctttagcagagtatatagttcaaaagatttaaaggtgagagctccttgggtgtttattgaactaaataagcaatttggggtatcccttttcaaagtttaagtctttccttgctgattacatccagcatctaattccttgggggaagccaaggctaatcttgactactgtgagccctgcttttagctgatacatctgtaacatgtaatttgaatgcttcttcgggtgagcaggttgcagtggacactgaatctgtttattcagtttctttaaaatgtgggtaagtgtacacactatggtatctcaagacccacagatttaacctgtccagtttatgacgcgtgctaatattataggctagtactgtgttgtgctggtcacacttaatgacttgtctctcagaggcatctgaggaaggaaaagactcaaatacccaagatgaaagttccgtttttgtttttgttttctctctaagagatgtgcgaaggaaagcaaagaagttagagtaaaaacattcacagtgaaacgtatcactaaatatataactaattgttaatgaagatctcacatggaaagtcttctggtactctagtatagctttagaagaaagcagacctcgcgtcccagaccttctgcatcctgagagtccctttacagggcattcacaggcaggacccaaaggcacacacagatgcagcggttcgcctgtagacttgatcacgcacagaatggactttttagatttgaaagttattgcagaagatagcccaaaccaaaaccgtgtgattttgtttttctttcaggatgagtgtgtagatgctccgaaagcagggaatcacagctacgtcttttcttaagctttaaaaatgccaagaggagctctgcctccctggctgtcagtgcacaagcctcgggggcaaccctgtcctggccctgtcgtccctgggctaggttcccacgtcaccatctagggcagcagactgcaaacttgcttttgatcaggcagagtgcagtgagggcctcctgcttgtctgttgcatcccgccaggttcggtgtcctttccgagatttgggggtgtgtggtgggctttacttacttaggagacctgcaggggacagtaagaggctttaaggtgtagcctcacagtggtgcggggcagaggctaggtataggccgagaactggaccgtgggccttggacgggtgagccaggagtgtggggcgccaggctgtgctggcaagcaggtgctggaacaaaggaagccgggctacccaggcctttgatgggcaaggatgtctcctcctggggctcctcattcgcatgcaaatccagcgctggtccccttttctttgaaggcaaacagaaggatgtttgtgtgtttgtaggcaagaaggcttctcgaacaagccttcctcaataggctgggtctcgaaaaataaaccagttggacaaacattggccaccagctctcctcctcccgactacaaagtgtggatttgctacaactcattaacccgacgcctttctctccttttccttgtttctttactcatcaaacgcccccgtagagcctggagacaaatgaccgaagcgcagtcgggagggaattgcagttaatggggagagggatatattggggctaatggttcaggcagctcccgaggaaggaccacacaaaaaggagcctctccattcaaggctctgttgtgctgcggggatttaatctgcagctagatttagccaaatgttatctattgcgggggtaatgaagcccttatgggttgaattgctccttgtaccacacatggtgtcatgacctcagactgcttcttggttgatttctttctctatcgggtaattattttatttcttttaaataaaaagctagtgcttctgctggacaacgggtttcctctccattcccaccccacacatttaagaggcacttgctttcctattttaagaaagaaagaaagaaagagagaaagaaaggaagaaacaagtaaccgaggaagtgaaggggaggctgtgggggagctttccccatcttttacttactgaagcatctttatatgcacccatctctgcttctctgttctctacccagcaaactctcttgtgtccaaactttctgcagacttgagctggaattcgggatgtgcatcccactcccaagttcttacagtgagcgtgaacctcaggaaaaggcttctatcccttgaagattttctttttcataaacccccatgttttcctgtagcctgctgactgggagaactggggcagtgctcattctgatggaaggtgattattttgatggaataccggcccctgtcgtttattaaaggctgtctgaggccactggttgaggctgtgcctgttttgtttttctctctctgaccctgatgactctgctttctttgcttgagggaggaccaagcctagagcagctaaaggtgtttttacaacccgctgctgatgggtaaggatctgaccctactacccacagctaagaatcaaggaccctagatcatgatatttaaattctctgctagccatacattctgttcaccagagcaaagtcacacgggggcaactaaaagggatgttatcactgtcgaactcaacccaaaatcagaaattttcccaggttctcatttggcttcttcagggggacttccctgtgcatttagttggaataccaagagttcccacacacccatatacaccccatcccttagaactgaaccagagatggacctagggagcagctttatcctcactcaagtctctgcctggtgcagctgagtcacgcatacacacaggcgtgcatgctcatggcccggcagctgcctctttcccctatgattttgcaattaggcatatgttttttgttggtaaacgtgtttgatgtcatggccagtgaaatgtggtgtgtttatagggccacgaatgtaaatgtgtaaatatgtttagtgtaaaatctagcccttcgactttagcaataaataggctgccaacttggatccccttacatttgacagggagatggagtccctgatcctggccagctgctagggctgccacggcttgtactttcgcaactgaattcacttttggctaatttctttacacatcgcacctctctgatcacatcttgctctcgctgtgaccagcttgggctgcttttcactgctgacccttctggagttctagaagcttccaggtttttccctcaagcttcttaacaacaaaattcctctagtcatcatcaagaaaaacctagaatataacagatgacaactagtgaaccctttccaaggcctttgcctttaggcatgacaggatataggagctgatttggtggttatgtgctgacccctagccattaccgccattactaccaacatcctaactgtaaaaagtgctttgatctagaatgtggaggctggggcagaatttgaggggatctgagctacaaaaccaaggcatgtcaccctatttcaaaaccaaaccacacgaattttgagctactctaacttttaagagtgtaatagagatacaggagagctcagaagtaactgagtaactttccaccctaactgaggacactgggtagctcatcccagatcaagaagctgttttatcagctgggcgttggtggcacacgcctttaatcccagcacttggggggcagaggcaggcggatctctgtgagttcgagaccacctggtcttcaagagctagttccaggatagcctccaaagccacagagaaatcctgcctcaaaacaaaacaaaacaaaaagctgttttatgggtacattaggcttccctttcttattccagccagtactctcagtaaacattagcgccccggcccccagggtttctctgtgtaacagtcctggcaggccttggactcactgagatccctttaaactttaaaggcatgcaccaccatcacccagcaaacattagatttttaaggaaggattttcactaatatttcagaaagaatctcttaaattttaaatttttatttgtttgcaatgctagatgttgagcccagggcctcatgtatgctgggcaagtgcactaccactgagctacaccccccaggcctccagcagtctttttgaaagaagcctgatagattgcactgtgaaatagtcaggaaaagaatcactgtggactctgctttaccaatcagatagcaaagcttaaaagagggtaaataaatgacttgcccaagatcatagctattgtgacttcactactgaaatcccactttatttacaagaccttgttgtcactttttttcttattattattatcattgggatttgttaagtcctataggggtaggaatatgaccagaagtcatagagtaagtgcagttctttcctttttgtatgctccccatactctctcccctatcatttccataggaagcctattgttctagctgtatttaaaatcaacagctaattgtttgagactttctccatgtagttctacatggtactctcctagcatccccctttccattcctcctcctcctcctctcttttttccctggcatcagcaatcccttaaaaaagtatcctgtctgattacatccacaaacaggtcatgttgtactcctctttacctgtatcttccacttctcttgtagattgaaacaaattatcttatgtgcatccatgtttttccatgtaagcatgttgtgcaccacatgcatgccttttgcccatggatgccagaagaaggcattggaccttctgttattgaaccaaaccatcttatgggtgctgggaatcaaacttgggcaacaagtgctataaaccactgagccatctctccagccttttgtaggtttttaaatgtcaaagtttggcaattgagaacatttttctaaactgctaagcagatcgcacaaatgccttaaggctacatcctacatctttttctttttcgagacagagtttctctgtgtaacaaccccgtgtaaagcctggaactggttttgtagaccaggctgacctctaactcatagagatccacttgcctctgcctccccaatgctgggattaaaggcatgagccacttctggccggcaaggctacattctttctgttttgaaaaggaaagagcatgtaaggagtgagactgattcaataattaaatgagaaaacagttctttttttttctttttgagaacatgtgctctcttctttccatacactcttttgaagactttgctctttttgcacagctaagtgtaggtaatgtgctgtagccagtgattttaatccctgcagatttaatctacagcacaggagcctctgtagccgtgatcttatcagtagctcctatctgccttggtgaacttctcccacagttgaagcactggtggatgaattccggactgcctaccagttcacccttgcccactactatccagaaaagggcagctttctcaggcaggggctggggttactgttttgatactccatccagagctagggctgcaactcagtggtagagcacttgctgtgcaggcacaaggcttgataaactatgagctgcagaatacaatcaagaacttatgacagtcttttcaaggaacagtgattaatgcaaaaaaaaaaaaggttctttttaaacaccagaaacaacaaaaataattaatggcacaccttgaaagatagcactgcccccataaaaacagttcacaaacattagcatgcttatttaaatgttttggaaatctgaatatgaaattaggaaatgaggtggaagggtattttctacttttaagaaagatattttcaaagatagggtattttcttgtgtgtagactactactgatgggagatatatagtcttgtaaggcaagtacaagctatgattgtggcttagacccagctgatgtaggcagcagcagcagcaaacagttggagcatgaatatggggtctcagaaccttgcctggatcttactgcaccagagggtgccaggcacacgaattgctcttacttgtaacttcatcagtaaaggattggcaaacaaaaagaggggaggacagagatggattcctacattgcgagttttagcaatacttgtgaaaacagaaaaatattttcagtaataaagggaagtgacagatcacgtgaaaagtctacaaggaaggacttttgtgaggaaaaactacttgattctctatttttcatattttttaatgcagagctttatgtgtgtgaaaatagctacaagattctattgttaaataattgatgacatgcagagagagagaaaatcatcaaccaatctctaaagtctgtagaacgaagacttcatagaaatgaactgttaggtcggtttccactcttgtgtatagcttgcttccttactctttccttatctcttccttcttttccttttctcagaagatggcatgtgacagcaaaatagttatgtggcaatgctctggaaaatatagaagatattaatgtaaacaattatgatctgtggggcttcttcctacaccttattcattcaggcaaaaaaaggggggggggagaaaaaatccccaaactttgggatataactaaatccttgaattgtaaatgtctacatgcttactttcatcccatcttcctatctctctctgaaaccagttattgcttaatcctttctagaagtaatgaagataaaagagatgacgtttccccttacttcagtcagaattgtatttggactgataactttctagcctcttctaaaataaacaaatggataatgttttaaacgcattcttctggcctcttgctgtttcttccctctgctcgctcatccaccgatcatctctaaccctcaagcttggaaaagtaggatcagtttgcactgtttgtggagcacctgctatactgcaaatccctttagatataggaaacaaatgaaagaattcctgacaccaagctgctcattacctaagcacaaacattgagcaggagagaaggcttttttttttttttttttttttttcagggaacagtggggcagagggaaggctgggcaggtaattcttttattttccattagaacacttctttttattactagaaatttctatagtacataaatgacatgatgatgttgtcttgatgataatatctttggcacatagccactttactcacagtatcaaactccttcatccagagagctgggcatctgagtttcctccgttttggaaggcttcttctgaagttcccagttctctgagaataaatgaaaggacggctgttatcaggctccctgtactgtgaaccaagactgtgacctgcacaaattgaggttacatccacacgggtctccgaagaattatgcacggagacagttgtgaaacccaagagcacatttcccccttcccacttttgaacattttattacagataaaaagaaattttaaaacaaagtaaagtattttcttacgttattttaataacttttcaaataaaaagaaaccccacttgagaaatttcaatattcaatttgcaaacactgtcagagagttcgggttttgatccgctgagggtgcacagcccgccaagaatttcccccccttttcttttgaaatacaattcaaacatttacctcacctttaaagttgtcatcgctgaggagcttggtccaagtcatccagtttggattttgtcttcttctccaaaagcaaccaggaggacacagggtaaagcaccacggaggactcggtgctgtgtttgtctatttcaggaatttaataatttgccttcctcctctttccctggacccccctccagctgcacacatagcagggctccagaaaaaccagctcccacacagctttagaattatgtgagatgggaccccttattctggggagctggtgggtgagggtcgttattgtaactctattctgtaactaaagctctggcgtgtaataaatctctccccaaagacttttggatctttgatttgaaaaatcggattcctttagtggaaacacttgacaggaacctaaaaggattagttgcattccgtacaggataatttttactggcaacattttgaaacgatttgattcctttcagaccttaaacaatgtccagaaaaatgatctaacgagaatcgtattgttttcctttgtatgtcaatctgtctgcccctcccgccaacatctccttggggttttttgagggccctgctcccgagccgtgcaccgaattacttctcggatcgttctttctatcaggttatcttttcctgccaggggacggtttgcgcctcctgggcctaccccgggacagagggacctcactcctagctccgcaagggctgctgcaggctgtgcaaaggcctggcaggaggtcgccagcagcttggcggtccccagtccttatggcccaacattcctcgcagcggaaagcagagagggatgggtgaggacaagcaagagcaaggaatttgcggctctctttcgccccgcggctcagcggagccctgagggcgagcagcctcctagcgcacagcgcacggctcctcccggctggctctcggctgtttattcggttgtcagcggactttggagatgtttttggctagaggttctgacccgcccgggcgctgtggccgctcggctcggactctcccggctgtttttacacctgcacagactcccccgcactcctcggcctgatttattgcctaattaaaggttcagtgctctgcgcgccacccgggctcccttcccgccnnnnnnnnnnnnnnnnnnnnnnnnnnnnnnntggacctctcccgcagggcccctcgaggatgcgggctgggacgcgacggccgtggccccgagacgccgagctcccatagcggaccatggctgtgggcgggaggcacgggggtcacagaccgcccagcccgcggcccagcctaggctccaacctcctccttggcggccttttctttccggagagaataaacgtcaagccagcggagattggcagcattgagcatcttcctaaaccagctctgtcttctttccatctatcaatccacctttctaattagactaattaggagcgctttgcagtgtcgctaggcccagggactgaaccgcttgggggttgtgaaaagagccctgaatggccacgctgggggccaggcgggggcctttgcgactcattcaccacagagtaacagtggctacatttatccctagccattgaaaggaggctcgattaaaacgtttgggaactaatgccaccttgcctcccctctaattagaggaaccggggagatggcgggagttcggggaccctgcagacacccttcctgtgcaccactgctttccgccctttcctttcaggagacaaaagtccccccccttcccacctgttgcccggcccctgctttcccatcctttcagagctccagtccctgccccaagcagaaggcccagccaactgctctaggacgcccagcaagccaggatgctgggggggggcgggggggcatccgagcggaaagccaggcgtctcagaagtatcctttcggacaccgctctttctggagatagccacccccctcatttctcccattctacataggtagtcccctctccaccccaccccacaaaatttggagagaaagcatttgtgaatgaccggaagtgggttagatgcccctctgtccgctctcctggtctcctgtcgtgctgacaaagtttcttactagtagaaataatttgtgcattttgtcactagtctgtctgtctttcccttcctctctccctctctctctttctccctccctccctccctccctccttcttggaaaaatgtctttaagcacctactatgtgcctagagactcttaacagccccccccccccccccatcttcctttgctcttagcctacctttaattacatcttaactaaaaccggacttgattcctccggcaagctattgagtctctttctatagctgtaatgtcaacatatttctctttatctttctcattgcttaataggaagaatcccagacacaagctattagggacgtaaaagacaaatgagaaacagaagtcgtttgctaatacagatttttgtgtggaaggaaagttgcttggttcattttgttgacgagatgatggtgtctagtatttttacaaaaatgtgaaacactttgccctaaaacaatggtgaccaagaaagtttgattcttcgctttcttcctctttttactttaacccccacccccccttcttggaaaagagccagatgtacaaagaaatatcatcaggtcactgttcttgatcatgttaatttagaaaatggaaccttggtagaagatgctattaactaaatgtcaacccacagcgtgcagaattccttggatccaaacttcaaaaacaaaaatgaaagatgtcatgtgagtgaaaggaattgtggaaattttttttaaaaggcctaaactgatcttaatagagttttattgcttccacaccctacctcacaatattttaatttaacagttacagcatgcatgccattggaacataagtccagcctcttaagaagctgggaggagcaaagaagaggaaggacttttttttttttaactggctcatttgcattggagaaaatgacaatttgcaaacatttcaagttcctggaaaccttgaaatagaaacccctaatctataccgtctgtgatttttatcacaaaacctctcatttttccatttcagctgttgatttgaattttaatgaagattaacatacatttggtcaagggtgcatccccataagtatgcagagggtggatacaaacctatataatagtacttagatcaagattaaaaagaaaaacaagacggaagagtcccctccagctgcttcataataaacaccacctccatccacccactagtcttgtttttataccctcagatgggtcttatactttcgtgaattttatataaatgggatcattcgatgtgcattttttgggtgtcttttcttcaccatgtttgcaagattcattcacttgaatccataccagtaagtcaatgtagggtgcaaataatttatacaggtacaaatgaaaatcaaacagtggagaaagctttagtttagacaacctgccccataaaacacccacattccattatcatccagaaagataatcctaagtgaataaataaaattagtttatccatacatagtaactgtgggttacatcattttcaagatgcaattgtgggtagctgcaagaagagcagaagccacaggctgcttttgtaattggattctatttcctacttgccatttcatcccctaagactagtagtaagtactttgggcctcttcacaaagaatggcatgaacttgagagggaagtaaattgcatccagtttgttctgtctcagacgtgtaagtccttgatgcgacagcctgtcaagtgtgttttgaattctgtttgaaagtaaagtgttcaatttgcaactaacacagttaccctgtttgtaggtcaccacacagaccagttaacttcagagaaaagcacagcaaacctgtagaattgtaattgtcctcctcaatgccccttccctcagaaatctgcccacaaaaccaacctttgcctaaatttatgttgccgatgatcaagcagagacacccaggaagaccgtcatcaccagtcctctcttccctcaatggaaacaggagcatgcagactgagggcctttccctcaggaagggtagtgtctaggaataggtctatgtgtgcaataggagagatgagagcattgtgaaacatgtttttggttgattatattggacttttgtaaattcaaagttgggaacattctgttttataatcttaagtctaaaaattaatgtaaacctataataaagcacagagttcactccaaggaaggcagtatggggttaataataagataactccactgagttatcataatatcagacaaataaattgaattacttatttaaaaatatagcaagggccagtaagattgcccagtttacttttatttttctaataatttatttttatttttgagcattgattggtgttttgccttcttgtttgtctatatgagggtgttggatcccctggaactgccatgtgggtgctgggaattgaaccccagtcctctggaagagcaaccaatgtttttaactgctgagttatctctccagcccccaagattgctcagtttttaaagatgcttgctatcaagtctgatgatgcagttagatccccaggacccatatagtggaaggaaagaacacacacacacacacacacacacacacacacacacgccatactgtaaaaaagagacaactatataaaataaaaatagcaatactacccaaatactatggatgttgagacactgatctcttgcatattacctagtgtgagtgtaaagtcaccctgaaagatattacttataaaactaaaaatgacttaccaccctatccagcaattacactctagactagggcctctataccagagaaatgagaatttatgttcatagaaaaacatgtatgcaaatgttcatagaagattcatttgtgaaataaagaaaggggaaaggaaagagaaaggaaagaaaaaatcatattcatgagccatctctccagcctgatttaaaatgattacagagacaaggacagattagttatgccaagaatcagggaagaggagatgtatgagtgcaaaagggtagaaaggggggttacctggtgatggagaagtctgcaccttaatttgggggctgctgcatgaatatatatatgggattaagttgcataaagtgaaacacacacacatacacacactgctatggcctgatgtgtccccaaacacattgaaaacatcacccccaatgcagaatgttaggaggtagagcttagtagagagccctgactaggttcactggaaaaaaaaaaagaagaagggaaaagggctggtgagtgtgacagggtcacgtgagaacagaggcttgccccttcctgcctttcctccaccatgtgagaatgtagcaagaaagcctcactcatgccttcctgtgctctcatcttaggacctgggatgttgaggcagaaagactgttgtaagttcaaagccagcttgggctacagaattatggtcactgtctcaaaacacccaaaagaggaggaggagggggaaaagaaggaagaggagggctattaccatattttgcatatcctggcacctagtacttggacttcctagtctctagaactgtgaaaaactgctctttataagtagcccagtcgcaaccaatctgctgtagccgtgtagaactaactccctcatatgaatgcacataaaatggagccagttatataaggtacttaatagtgctgcacaaacatcaatgtcctgggtttgtggttgcactgcagctatatactaagtcaccactggggagtggtggctgaagggcagatggaacactgtgggctctttttgcaacttcttgggaatccagcgttatttcaaaagaaaaaagatccttcaatcagtgtctcattataagactttctgctgatgacaagagctgtcctaggtagattttcataattaataaggcaatatacattttcataagcaatgttcataatggttttattaatattatatacgataattgcccactgtgtttcatgtggagagctccaatattgaaaatgaaaaggttttggaacatcaaaaatattgttcattcatttgaaagtcctcgttctttgggggtagatttaactgtgaattgtcaatatcgccaagagtcaactatggtaaattaggtagatgaccaaattgaataagactttttttttttaattgaaggcttatagaagatctctcacacatgtattctaggaaccggttacaaagggaaaggtttttgtttttgtatttgttgtttgttttttcaagacagggtttctctgtgtaacagtcctggctgtcatggaacttgctgtgtagaccagaatggtctggaattcacggagatccatctgcctcttcctctcaagtgctgggattaaaggcatgcgccaccactgccctgctaaagggagagttcttaaaatgcccctgaaagactttgacattagtctttgtccagggccacacttagaggggaaacccatttgcatgcttgaattctggtatttgtcacatttctagagtcacactggaaaaatggttcttggaaatttgatgcttattttaaagatgctgtcataattaccatatgacaaagtgtctttttatatggcacaaactggcctggaacttattatgcaacccagtctggtatccaacttgttaccctcctgtctcagcctcctgagtgctaggatttccatgtgcaccaccatcaggtgtttaaggcagtggttctcaaccagtgggtcatgaccccaaaatgtcaaatgaccttttcacaggggttacgtaaagccatcagaaaacatagatttttacattctgatccataatagtagcaaaattacagttatgaagcagcagcaaaaataattttgtggttggggttaccataacatgaggaactgtataaaagggtctcagcattaggaaagttgagaagcactgatttaaggggtagcatttattagtttcctttttttttctaagacaaggcagtacacacttctttacttggtttataaagtcttccatgtgaaaattttatgacctctaatcactgtttcaactttcataatccctccacgaaagaatgactcaacaagaattagttaatcaggtgaaaatttgcctttattatgaattcagtaggtgcacaattatggcacacttttcatttggatccttcctttaagatctggcctgtctgcctgcctgtaagtggatcacggcatataagcagtctgcactcctactgaaagcagcccaaattacaaatgacttggtgtcagacagattttaaacttgggtgccagtagtgttttaactatggggcttgttcttttctttgactgttgtattattttatttccactaggaattgtggagttctaaatattattagtggtttaccacttttgcacacatgtgtcctattaattttggagacatgggaggaaagtgacaggcctcttttctcccccccattcatctacctgctcacacagacaggcccctgtctgtttagagttcagaagggaccacacagacgctaagaaacttgagcacaagaactggatcatgggtatctgggggcgggggtggagggatacaaaaacctctagtaactagattgttttggtttttagttcttgatttgcttgaaacagctcatgtaaaaattaaggcaacttacaatgtacggcttagctctgtaaagcctttaaagaaattttagagaaaacagaacacttttacttaaaaaaaaagccgctaaaactacataaaaaattaatagtagactaagcccattcattctgaaatgctgtaaggagtaacaaacttgggaatttgtgaccttagtcttatgtctacacaacatgatacacacaaaatagcataagaatagaaaaaaaactacaaataaagatcacattaaaacaggtacacttaaagcaaaacaaattaagggagatcaaagacctgcctttagtttcctattcattctcactgagtcatcttgcttgcacttagtgagcacctatagtatgctgagcataatgggcgttgctgtggatacaaacaaagacaggacatctggctggaggagggagagaggagacacacatgctaattaaaatattacacagagtacgtcaatataaatatgaactgattggtaaaagatcgcagcaaaagaagctgctatctgggaggcccaaggcaggcttctcggaggacacgacgttggagctgaattttggaaagcaatagaacttccatatggaaacaaaactctgagtgagcagggtgcttccagcatgaagagggaaggtgatgctggggtctcatgatacagacgagcagtagactattctagtctgatacagtccagagtttctgtagcggagcagagaattggcttgcatgtgagcaatggggacagggtggactggggcctgtcagtcaagcatgtggttaactgttgagtatatttagttttccaaacacatccctgtcatgttgactcctaagtgggaaagtcctatgagaaacacaagtgttcgaatgagaggagaaggctcacttcctccaatccctatccccaatttgtcagccttggctgacctggaatgctctatttagatcaggctggcttcaaacttagagatctgcccctgcctctcgatgaccaggatatctttcctgatagagcagagtaatggaaagatacaggatacagagggttgaaaatgcctggggccaggagagtggaaagggacagactgggcttgttagaaggagaacagattgtaatgactcacatgatgctagaatgatgccccccacagtctagcgtccagtcttccttactcgggtgacccaggtttcagacttaacgtctctaaactctgctatctctggtcccagattcagctgcctgctagatattccataacattcccaaggtaagcacctctccataatcgattcccttctcggctaatactccatttccctagtaactcagccttaacattttcagagtcttgatttctccctccatcacgctgactctgagaaccaattcttccccagtgcttgtaagttttgcagaaacttgcctcatctcctttcttctccactcttgatgctgggagcctgtaccactaagctgctttcagcttttctagtctgctcattgaccaacacgtgttacaaattaactttccaataccctctgtttgttttgggagacagggtctcatcatttagccagagctgaccttagctcctggtcctcctgcctccaccactagttagtatgctcccatgcctgtcctccagaaaggtccctgtcttgacacacttctttctgttcaagaactgaaagtgactttctagttgctataaactgtccagttctaatctggtcctttatagttgggtcaaatttactgtctaagggggccctgcaattgttctgcgttttacactattgatgtcacagtccatacctggagagtctccctcttctccccgtagtcgtcgtcattacataagaactggctgagatttctaccttttcttggaaatactgttgccttatgattatatcactgcatgagttaatgtgtatggaatacttccagggaggctgcatttgaattaggttagaagaatcatgtcatgtgactttccggcattctaccaggcacacctgcttttccttatcaagtaagtggacgagctaacatggaggatccaggcttaggtggtcttacttgagaacccaggcctcatcattctcatctgtccccagtgaaaacatgtacccccattctcgacggtttattttctatcccatttatttgacattattctattaaagactcttgtgaacaccatctttattgtgtttgctatgaatttcctgccatatttcaatctacttaaatgtaaggccacatcttttttatttttatttaaattctttaattaccactcatatttacatatccatccccccattccttcccccttccatcctcccatgttccccaccatctcccccctacccaccccctaactcctccccagggacagagaggccctccaccaggcaccttcaaagtctgtcatatcatctgggggagggcccaggctctccttgctgtatctgggctgcaaaagtatccctccatagggaatgggctcccaaagtccatttgtgctctagggttgaagactggctccactgttagaggtcccatagacggccctggactcctagctggcacccacattcagagggctcattttggtccaaagctttaagactagggtctccatgctctcactaggtcaggtccactgtttctgcatgtctctccagccctgtcttggctcctttggtcatccctccttcctctctacaactgaattccagtagtatggttctgtgcttagctgtggatgcctgtttctgcttcaaacagctactggatgaaggctctaggaatggtaaccaaggtagacaccaatctcattataggggaagggcatcaatgaaggccacatcttataattattttttttgtcataccctattgatattacaacattttctgcggactggaaagatgactcagtggctaagagcatttgttgctcttgcatagggtgtgggtttggttcttagcactcaatagcagtttacagccatccaataacttctgttccaggggatctgatgccctcttctgaccagataccaggcatgcacatgatacatatacatacatgcaggcaaaacactcacacatataaaataaagtaagtaatctataaaactattttctgactactgaatacgttgaccaatctggcagatgaatgatgtgggtaaaacaatttgcagaaaattgtctttgtctatgtatccaaaggtaaaaccctgaaaataagaaactgttctaaccaaccatctcagcctaatgaatctggagtccaactagcacagtgagggtgtagtagcttacatttgcatttgtatgaatgacatttacaatgctctgctaactgttggttggcctgattgtagttcatagaataatgcctgttatcttcaataataatggaataagagaagacatctgcttataattcataggtaccatacctaaaaggtctttccattcaaaataatacactttcttcatactttcatttacttgctttgcctaaaacttgatttgtattttgtaagcaaaagctacacatactcaataattaataattaaaagacaaccattccgcagctggagagttggttcagcagttaagagcaccagaggacccaggtttgatttccagcacccacacagtacttaatcattggtaactataggggatttgatgccctctttcctcctccatacacactgcatgcgcgtgatacacaatatacaaacagacctaacacccacacataaaataaaaaatgaaaacaaaacaaacagacagaaatcacaaccattccatatttgacttgtgggggagatcacatttaaagtgatggaccacaaaatgatatggccccagtagatgaagccacttagtcatgagtcatgactgtcttagttttcatacctacaatacacttatgctgatacaaagacaaaatcacccagcaacaatacagttctcaaaatgcattccttttattaaattatatatgattgtacttataaaagcaagaaattggtacaaaaagatctttttaaaaattacagtgcattattaaactgaaccaggggattatgtctctttgaactgttgactttggcatgatgcttttccagaagcaaccagcatgaagtcagttcataggagagttgcaacagctgttatgaaggatcttgcctttcattgatcacagagttgccaaggcaaagcgactaaactctctattggctataccaacagaaagttgagaaagagttaatttcaacaatgcaatatttcttattttcatcatatgtgtcaaagggacagttgaggtcttccacagttctaatagatatattaatttttttatagtactgagggtgtaacatcaataatacagttgtattatctgctcagatcaaaagctaatgcatcctatgaacaacacgaatgaatctccctaatgagatttgagaatagttcatacaccctctgcatgaactactaactagaaagtttgttcattgagtgtaggttccactatctgcctcctgaaatgtccagctagtcaaagggtacatccctagacttttgcaagctctaacacttttggatggcctaagatgtacaggacgacatgccaagccctaggggagtataaacaaaaggaagggtgaaataacatttatttagcagctactgtgtggtaagaacttttatatcacattgcttttaatttacatgtcaaatctaggagatatgtgtttggtctgtctccaaaatagaaacagactttcaaagaggttaaataaataaattcaggctacatggcttctaccagagttgagatttgaacccaaagcttccttccccaaactctattcttttctacaataacatagaaacttttgaagatatgaccatgaatttggaagtatggtaaagagagtaatacaagtctgaaatcccctgtatacatgaggctgaggctagagggctgaaagttcaaggcaaacctgggctgcatagggagattttctcaaaaaccaaccaaccaaccaaccaaccaaccaaccaaccaaccaaccaaccaaccaaccaatacctaaataaataatgcaaagaaagggagagggaactggatgggacacaaccaggaaggtttcagattttatattgtaactattgtatatcatgggtgtgatgttaactatctctagaaggacctagcacacaaattagctatttttagtcacttatgcctttgggaacacaactgtgacaaataacattttaaaaattattattattattattccttttttttatttctgtgcatgtgtgactctgtttatgtgtgccacctgagcccaggagcttggagtccagaagagagtgttggcgcctctggaactagagttacaggctgttatgggttgccttgtggatgccattaaccgaatctggatcccctggcaagagcagtaagaagagttcttagctgctaacgtcccaattacaatttattttttgagtttcaatactggggatcaaatctagagcctcctgaaactggacaggggcatggttgacaaaatttcatctagacatgccatatgaggtactattatatgaagtaagcccttctcagtcatcagtgcaagggaggcggctcctagaatagcttcctcgagccacacttcctagtagtcacaacttttgtgcaatttccttcctttccgagtacgatccggatttagtgaattacttccatcaaagacaattcagcaaatgtggtgggggagcatatggcgattctagctgttttgagggccctccgtaacgatttccaaagtttctggataaatttacatcccccagcagtggtggctaaccccccattctcactagcatgctctttcacttgttttcttgaggacagccattttgactagggtgagatggtgtagttttaatttgaatttcctcgatggttaaggatgttgaacattttcatacatttattggctatttatacctcatctgttcatttcattgggtcactaattggttggattgattcttttcttttcttttttttttttttttaagatttagtttttatgtatataggtgctttgtttgcatatatgcctgcagaccagaagagggcatcagattgtgaactgccatgtggatgctgggaattgaactcaggacctttggaagagcagccagtgctctgaactgctgagtcatctctccacccctacttttttcttggtatatgtggcttctagatcacctctctctctctctctctctctctctctctctctctctctcctctctctctctctctcatacacacacacacacacacacacacacacacacacacacacacacacacagtatgtaaggcatgaaagtagaagcagggtaggaccagaggaattaaagacattggtggggcagaggaggagaaaatggaaatatggtcaaagtccatgatgtgcttgtatgaaactatttctacgaaacaaaaaacaaaaaaacaaaaaacccccaaaacaccaagccatcactatgtacaatgaatgtatgtcaattagaaaaaaatagtattgggatgtgactagctggtgagtgaccatcctgtcctctcgctgtgtggcactgatgcagttgatgcaggctacgctctgtttagagacccacatggggagaaactgaggtcagaccagcagccaacagccctggaagaactcatgtctcagtccattggccactgaggaactgaatccttccagcaaacatgtaaatgagctggggagttaattcatccttgtcagactttgggagacctttgtgacacttagacctacattaggggatctagtcaaactgcactctgaatcctgacccacaaaaaacttcaaggaagtaagtgttgctctgaattcctgtttgggttaatttgttacatagcaaagatagctggtacaaacacgcttctcttctgtcaggcactatctggtgctgggataatagggaatggagggctgtgtctgagtgtgagtactgaaaacctccactcagggagctgtgcgggctactactgtacagccgtctcaagtctttcttattccagttttacattgtttattttgtgcttagaataccaccgtttgttgtaaaatgattttatttctttatttttaagtctctctctctctctctctctctgtgtgtgtgtgtgtgtgtgtgtgcattcatgaatgcatacatgtgtacatatacatttgtgctcatgggtgtgcacacagacgcctatggcgtttagaagagaatgtggagcaggagttataaatagggattgagagatgccaaatgtgggtgctgggaaccaaactctggtcctctgctagagcagcatgtactcttagccactaagtcatgtctccaacccttgtggattacccttaaatagagatttttaaaagtaatttatttcattttattttatgtgcattcgtgtgagagtttcagatcccttggaactggagttacagacagtgatgagctgccacatgggtgctgggaattgaacccaggtcctctggaagggcagccagtacccttaacccccaagctacctctccagcccctaaatgaagatgtttattcagatagccatctatagctactactcagaagtcctcactctacacccaagaatagctataggcaaaacaaaatctagatagaataaacccaagttccattttgagtcgttttgttagtaagaaatactcttctggcaaatgactgttatcccagaactggagagactggagccagcctgggctcatagagtgaccctgtcccagaacaaagcaacaaagccaagctatcaaagtatctcagtattgaattttatgatactttgtatctcttagaagttgatacctaaaggcagataagaactaaaggaggctcttctaggcaacagcaaacatataaatgacccaaaaagatgtttcagatttacaagactgagaatcatgctgtatcgttttcagagaggtttctttttatagtagagaaaaagaccataggaaatacctaatgttttgtgttcagtcaacacatcttgaaacggatatattcctatggcagtaatagaattctatcataaaagacaatagatggtaggtctttatttttttcccaaagactacacgactttggtggataaaaattagggtgacctaaatacgaacagattaatttatatggaggaaaagttacaaatcattcacttaaaagctggctccatgcccacattctagcagtacacttgggaggcttgtcgctgtacagctaatgtctacatggagcggatttctgaacataatttatgtagatgaagtgtgcagaatgtttttatttgttctacatctcactgtctcacctctgcatgaacttccccaggccagatctactccaaatagtctcactccccttctccacacttccctccaacgtgtttgccttggcaactttcacgttcttacaaacagttctcccaaggaaatcaatcactcttgcacccaaagagaaatactgcgcactcagtgcgatgactaaatgaaacatggttgaggcaaaccatgtgttcccgcgtgtcccggattacgctgtttgctccaggaacatgttcctaatgtgtttggcttctgttaccccttgtgattgcaactttcactgtcttttggaatttatgatttcagaagcaacttcttggactcatttaacaagacatttttagagtgtgaagcctgggggactcattgggcctcgtcattctggtctcctttctagactagtctggcccaagcaagggcacctgctgtttgaggaattgtggggaggttgatcttctcttccatctggaacaccagacagaaggcttatctaaatgacatgtgtctattgtgctttgaaagctatttggttcatcaggcacattatttggagatatatatatatannnnnnnnnnagagaaatttggaagttcaaatacaaagaaatgataaatattaagaagatggaaatcccagcatttgggaggcagaggtaagaggactcacgtttgaggcccagttgtgctatcattgagagtttctagtcagactgggctgcacagcaggactctgcctcaaaaaataaaataaaaagagagaaaaaagaagggggagatgagggtggcccctatttaatcattatacaacaattacatgtttcaaattttatgtttcatggctggcaagatggctcagtggggaacggcaccagccctaatactgaggacctgagtggtccccagcactcacacagtgggaagaagtgcccctttggcattcgcattcatacacagcacacaagtgctcccccacaataaacaaataatacataacaagaaatcaccctgtaaactactgccaaattattatcctggaagtatgttcacttatgtgtcaataaaggggggggagaagaaggaagaggagatggagtaaagaaagaaagagaaaagaaagacggaaaggaaggaagaaagaaagagagaaaggcattctctttgagctgcctccctggaggccctcaaggtaccaaccatactcacattgtttactaaacattgcagctgcaagactaccaattctatctcatgctggggccaccaaattaaccaaaatgtcccaccagctccctctcctttggtgtctctttccttacccaaggatcatcatagggagaagtcagggtcattagcactttgaatttttgtgctttcttctctgaaactcttcagaggtcccaggttccccctccttttttttttttttttttttttttttaattctactttcctgtggagcctgagaaactgagttttgtgtaagtctaaggtggttttgttgctgctgtatgtatgtatgtatgtatgtatgtatgtatgtatgtgtttaatgtcaccttaggggctggagaaatggttcagtggttaacaacacttactgttcttgcagagttgggttcccagcacccacatggtggttcataacctgtaactccagttccagggtttctgaaccctcttctggcctctgtgggtattgcatgaacacggtgaaatataaggatggtggtggtggtggtgggaacattcatacaaacaacatgaaagaaacccacactattttccttttacatttaacttaattaaaaaacttttaatatttgtttactcaattttgtggtgctgagagttgaactgaggtctttatgtttggcaagtcctctgccattgagctttactcccagctcagttttagattatttagagccacaaatggaacaagtactttttcctagtgtgtgggttgaatgagaacaatccccataggctcatatatttgaatgcttagtctccagttggtgggactgtttgggaaggattaggaggtgtggccttgttggagaaggtgtgtcactgggggtgggctttgaggttttaaaagcccactttattcccagttacctctctgtctctgccttatgcttatggatcaggatgtaaattctcaactacaaatccagcaacatgctggcctgcctgctcctagtcacaatggccatagactccaactctctgaaactgtaaatcctaataaactcttccttctttaagttgccttggctatgatatctgcacagtgatggaaaagtaaccaagacatctagcctggagtctcatgcattgaaaactaagtatgtgaaaaggaatcaatcactttttttctctttcagcaatgggaatgaaactggcttggaaggatcacaacagaatctaagcagaagggacaaaaagagacctggatttaaaagatgggggtggaatggggggggcaggcctataatcctaggctgaagcaggaggattgcaaattcagagtttgcctgggcttctaagagagtttaaggctagcctggaaaaactagcaaaaccctatctcaaaagataactaagtaaagagagagctggggatgctgcctggagttagagcatttacctagcatataaaatggagaaaggaaaggagggtaggaggagggagaaagggagagaggaagggagggaaaagaaaagaaaggggatattagaactgacatattcaagagacctgggaaatatacttctatgtagtaagaaacatgttcataaccaaacactaaggtttctattaggaaactgttgactccagggcagtgaaatgaaacttttacactgtcatcatcctcagacactggggagggagctcttggtgcttaaaagggatcttatgacactccattgtttaagatcacaagcttgggagcacaaacagaggacaatggtctgccactagttaacctggcaaagaaattatttaacttccttaagtcttagtattctcagttgtaaactgggcaaaaatatctacctcaaagatgtattttgacagctatataacactgtggacataaatagtggcacatgacacaggtgaaatcagtattaattgttatcaacatcatcttattatcaccactgccagtgatttgaaggtgtccctcttaaaataagcacaggagtctttttttatttcttttctattttaaagttttcttcatttttaattatgtagataagcattttgactgcatatacatcaatacaccacatatatgccgagggctcacaaaggacttaagagggtgtcctagtccctgaaaatggagttacaggtgtttgtgagttaccatgtaggtgctgggaacccaggtcttctgcaagagcaacaaaggctcttatcactgacccatcttgtcagtaccaagaactggattcttagtacccagtgcaacaacattgagaggtggatccttaatgggaggtgtttaggttatgatgaccctgccttcccatacacaataaagctgcaatagctggagttggacttggtgtcaagggagtaggcgccttacaggtggacagatttcagctccattttgcctctttctcatgcatgtgatgccattaccagatgcccgtgctgtccagtgctttgcttttggacttcccagactctagaactgtggggagacaaatttctgttctcacaaattgcccaatcttcactgttctgttacagcagcaaagagtaacctaatacacaccattgttgacataccactttagaagttaggaaggcaaagtagaaatactcatgaggattaaggggccttaagaaaggaagacaaagttttaaaatggagaccagcttttgcagtttgagccttggagatgggatgggatttgtcatccagtatcctttgtctccagttctaagactgtatcacactgacacaggagtgcccctctcttatagatggaatgtttgtgtcttccctattctttttttttcaagacagagtttctctgtatatccctggctgtcctcaaacttgctctgtagaccaagcaggctggccttgaactcagagatccacctgcctctgcctcctgagtgctgggattaaaagtgtgcaccaccgtcactgctgtgcaaccaccacctggctggctcatttcccccattcttatattttatgtattgtcatcccgacccttagtgtgatgaaatttggaggctaggactttggaaggtagtaaggtttagaggaactcatgtgggcagggcccaatgatgggatcagtacctttctaagaagaggaactggttcgagcttgcttgctctgttgggtggggacacagcaaaaaggttacttttgcaaggcagaagagaattctcactaggcacccaatctttccatccttgactttggatttctggacttgagagttgtagaagtgagcaccagaggtttacactacccagcctgttttgttattgtattgtagactcctgtgctgaataggatgctcttgcaggagatggagccttggtcccagcctgcaaagacgctgcccttcaagcaggcacatgcacaggtcctctggacaccagacactgctgatgtccttcttttgagtggcaggcccagaggttgctgactcatggaaatccgagtttgaaatatcagaactattctcttggttgattctgaagacattacattccacagttatgatttttgggctggtctgaaagttttgctttccttagttcctttatctctgccaaccatttcccaaataacagaaaggcaggccgtttttcccggggtctttcctttcctgttataaactcaaggccatggatatctctgagggaaagaagccacaaacccccttcacgtttctcagagtcatagacaatttagttttgagttgggggcatgtatggtccttcctgacatcagccaggtggcaactgtcacatggtcgatgcaatcacgattagcataaatcaggcaattgaagggtatatccaatgggggagagacctagttcagatgtcttcacttgtggcttcccagcataaacaccctctgacagaggatgagggagacacggattcatggtttctaattgttcatttagctttcatttcctcaactctgcctgctcttggaggctaccacatggcatttcccagtgatcactagcttaggatccctgtgactgcagatgcgtgtttccctgtgcatttgaagtgatccatccgtcttaccctgcacttgggaagtcttctcactagggtaaattcacttgttccttgatcagatccaattcgataatttcaatgctggctcattgacatttcctgaaggcgctttctggtggtgagctcaccaagccagcacagctcaacctcattatttctcctaagattgcaccacgggaaagctcacttcagtagacatagctgaggatgtcagaggatgacagagggggaactactgcccccacccacagctgtacattaaaaacctctctctctctctctctctctctctctctctctctctctctctctctctctctgtgtgtgtgtgtgtgtgtgtgtgtaacacatactacagtgcacatgtggaggccaaaggacaacttgttagggacttggttctctcctaccacgtgggtcccaggattgaatttaggttgagaggttaggtggctaaggactttcccctctgagccatcacaccaacttggtgccattttcttaataatgccatcactagccaggatattttcatcctgttctcagttactagccagcacagagctatggcctagtgatccccaggcagctttacagatcaagactgtatactctgaaccctcatttgtccattgtcagacctgaagcttctccggttttcctagacagtggccagtggctttgcaatgactcagtgcaacagctgtttaatcgcttttggagcaaactcaacaactttactggagcaacgttgaaatgaagctttcttgggtgagttttgagagaggaaaggcaagaggaaggaagagtttaaagggaccaaggtgtctgtggagggtgttggcctgtggaaacccagtgctgctcgtgcttacacgctgggacctcttgccttggccccctttcttaagacagatactcctttctttcttctcttttgttgacttggataggaaagggcgtgcgatcttttcattcagctcaaacataatacaagaagtctcccgcactttggggacatgtggttgtgttctaagggacatctgcaggaagatggtcttgggaaaaagctccttctccagaacacagaaacatctccggagtgagtgatctccgtgcgcacagattcaataagcccaaccacacttggctggggcacaaacctaatacggcagcccatattgttgctcgggaggtctccagccaaaccgacttcttgtaaaaataaatactcatcagcaaatattttgattagttaaaaatgttcgagatggctaggccctcgctccnnnnnnnnnnnnnnnnnnnnnnnnnnnnnnnnnnnnnnnnnnnnnnnnnnnnnnnnnnnnnnnnnnnnnnnnnnnnnnnnnnnnnnnnnnnnnnnnnnnnnnnnnnnnctgctgctgccctgcctcctgtgccccggtggtctggctcctccgtgtggtgcacatgctaaacagattaacatgccttggctgacccacgcttcgcaacccgcggatagggtttctgcagctccatgtggaaattaacctatctgtacccgtggtcagctgcgcccggctgctcccgctctggccgggcaatacaaacaaacccaggccgctggccccctccctccgtgactcttggcctctctcccctttcctggccaaatatttattggaaaagaggttcttctctttggccgaaggtagggcacatttctgagagttctttatttgtaaatgattttttggcagggccaggcacccttacgagggaggtggtagggaactcattcatggttgggagctctctacccctttgcaggcagggagctatttgtgtttgttcagagcacactagtcccggcatgaaaaacactcaggctgtctgtagattgcttttgcaacagctcctctgtttaacaggatgttctgctttgttctagggcaaattccccctgctccatctctgcctacgattggtactcactgagtacggtgaaggaatttttctagattttctttcccacttagatgaattgaaaaaaggcaactcagaggttgatgggtaccagcctgagcccaagacttaatcacagctgcctctacctctcgaccaccactgcctcctccagcaacccagggtaatggagggattattaatgggtctccagttcacttgctaagcgttttccgtctgtatcccattattcaaccgataataacatgtaggcagctcggcttttcactagatagaggctggagggaatctgtgcgggttggacagggctgctgtagtgaccactgccagggagatggatggagcttttcagattccttaccaagaccttcatcctgaaaatgcccccattgtttgggaaccagggatggctcttttctgagataaccactattctcgacttaagcatggtcaccttacctcactactcaaagtgagcccaggccatccgaagttcctggccagcccgtcattcctccttggtttctggcagcctgtcatcaagttgggggtggtttgggtgtgtctccagtgctgtttctcaaggcctgtggcagctatccatcctgctggcatttactttccagtgccctctgctgccttggcattagtgaactgcgtgagacctgcaggtggcacccatcaagctgtatgatgggtgtgatggcagcacccaagaggcagacccacagtaggccacagtcaggcacaactgtccacgaatagaaccctgtgtctcagccagccgagtgtcaggctggctctgttggtttatttggcccgttctttccagctgtgtatttcttggatggatggcatgttcctgagctagaaaaggttttcagagtgcaaacttccagaaaaataatcagaaaccaactggcagcatattttagctggtggcagtgtgattctgaagggtcgaactagcactggcgtgggtaatatatgcatagttaagaactgcatcaaaatgaagatataaatagatgtgctgaggaggaagaaaaaaaagcattgctccccccaaatatgcactgccatgagaaatctagatttttctgctaaggcaagagaaaccactgggcctgaaaagaaaaaagaaaaaaaattgaggcacaaggctcaaagaagcacaaaggcctgagccagcccaaagctggacttccttgttacctctggtatggataacacctcggaattcattccagctcaggatggtggggtctaatcagaggctcccaggagagcatgctccacattttcatccaggcagctggcaccctaacttctggggagcctttttcttcatcagcacctccagtcgatgttgtccatatggatgcacgtgtgggaacacacattgcagcaacttttgtcttttgtcgtgaagggctgacagggcaataaacactcacaggctccctcctccaggaattcctcctcctccctgtgtggctctagccctgtggataatatcattacaggactaaacaaataagcagtcgatccgaatcaagcaggaggcactggggactgcgcagttcctctctgcaaagatgagacacgtaaatttacactcgaagcttggaagccctccagcagccatgaatagctgttcagttctgtcaggcggggaggagctggggtgctcggctgaccccagctccagctttgctcccatcaatgtgagctttcaaggttctgttttccttaccatcgacaactgagatcaacaagggccagtaacactttttatgaaccctgggctcaaagaagctaagctgactacagagttagcatattaaacccagtgacatggaggaaaacttaacacactcctgttagctgcttccccttccaatgtgactcccatgttcaggttgtcactgctcccatgctacagataccagagttacctctgccacaagcgcattccacaggcacgttgtttctttcttcttcagcaagagaacatggactatagtaagggatgcagcagacagtcaaattctgaccaacagagtacttaatatatgttacctttcctatcaagttcatacattgagatgccatactctttaccatgtatgaataattttttttattcataaaatttctttactggaaagagttcttatcacaataaaatgagcactacatgcaattactatgtttaaaagggaagctttctttggttctaatgatataagtatgtcacgtgtaacagttcaaaacccagagactatgtcacagttatggagaacaattttcttattttattgtatgtttccctttttcaaatacatggcagttctgggcttgaaaatctggtttttctttctttctttcctgaaacaatttcataaaagacattcttgctgagctccaactaggacacagactgctatttgccttttgtcgactgttttttgcttccttttagtagcaaaatctattagctgagcttaaggctacccctacagactacatttcccagggtcctttgcaggtagatttggccaattggaaataagtggaaatgctatacttacatagaagctgccgctcttggctctctttttcttgcagcttggttcaagggtacatagtggtgagggcaacgttgtaaggatgacagagcagcacaatgggaggaaactctgacctactcttatgtatcttttccataagagatgcacctattttatttcagatactatcattgatctttgttaaaactgcaactgctgtttccagcatggctccggggttggacctgacttgggtggtgagagaatgaagaaaagcaaacacacatagacaggcagacagaaaagctgggcctgagtgaactgcgattccttacagaggagccacacatcccagaagctcagcatgcttattatacacaagagaacagagaggcagggtgctgaagacagctgaatcaaggaggcagtgtttatggtatatgggtgagtcaagatttacctctgtaagagagcagacttcaggctgtaaacctaaggggatggagaaggctgcggtggacattttctgcacacacacaacactcgtgctaagaccaggagggaagattttgcatttttcctgagctgagactgagaaaggttttgctattttcctggtgggtttgaggctttggggtacctgacatggccatgttcatgttaaacaatgcacactcactcagaactttactcattccttacaataatccaatagtccaacaaatgcaacaaatgttctgagtttattgtctcatataaaagagtgggactttatggatcataaagaacaattttaagtcataatttggaatacaaacattaataaatatgcatgcttattccagtgtctgttgaataaaagaaaaccttttttttttctgaagtatgccttaaggaaaggggatagcacaatatagatgacaaggcaatagggaatgggggtactagatgtgaaaatgtttgagagggatggggtggacagatgggaagggagggaggggcaacccaaacaaagggtatatgaaaagtcatatgagggactagagagatggctcagtggttaagagcactggctgttctttcagaggacctgggttcagttctcagcacccacacagcagctcacaactatctgtaactccagttctaggggatctgatatcctcaaacagatgtacatgcaggcaaaacactaatgcacataagataaaaataaatttaaaaagaaaaatccatatggaaatctattctataaaccaattaaaagaggtagctaaaacaattagttagaagatagacatcctgccaggctagacaatgctgttcctaaaatccgtgagttattgaacaaaaatcccagttggtgaggtcccagaagcccctaaaacaataaggctaagccaccatgcaccatggttacaaggtatagagaaaccaaaccgtagcttcctcccaccttcacctttcatcgcatggagggtgctggttagacttcctggggagccttacccagtcattaaccttacaaactacaatgccaacctcgcagacaagatcgccttgttgctacagtagtggcataactgtcacagggatagccaacaggtccatgattgtatttgaagcccaatccacaagaaaaaattcatgtctgacactataaactgggtcaaaacttgtgaccgtggaggtctaaatactaggaaagaatacattactgttgtttagctaaattgacattggtgctaaactggttcctaaatacttatatttatagccatagatgaatgctattctcagccttaatcagagaagtttctctttgtagttataaggtgaatacagactctcatatctgctcatggtgctgagaataaatggtagttgagtgctcagccccaacagaacatttataccacctcctctaagtctcaggaagcatcatggaagaggaggcagagagaatgtaaaagctagaagacagggagaaaggctgtgaaatactgtcttctaagcatgacacagtcattgtgattttcatctcatagcagccatggctgcctacactgggcctgtcaagagtcaatcatgtatctgggaggggttctcagggtcccatccctttccacggaactatgggcaactatgtgcacatacatgcacaagccataggccagtctggggtcttgttcctcagtgtaccggatggttttgtatgtcaactcaaccaagctagagtcaccggaaaggaaagagactcatttgaggaaacgcctccataagatccagctgtaaggcactttctctattagtgatcaatgtgggaaggtccagcccatggtgggtggtgccatccctgggcttctggtcctgagttctatgacaaagtatgctgagcaagccatgggaagcaagtcagaaagcaactcccctccatggcttctgtgtcagctcctgcttccagaatcctgcctgtttgagttcctgccctgacttccttcaacagtgaacagtaatatggaagtataagcaaaaaaaaaaaaaaaaaaaaaaaacaaaaacccaacccaccccacccccccccaccgccccgcaaaaaaaacaaccattttcctcctagcttgctttttgctcttggcattttgttgcagcaatagaaaccataactaagacaagaggaatgttatttatctcatttttggagacacagtctctcactaagacccaatgctcacctggctagtctgacaggtcagctgatgggggggggatgtccttctgtatatatgtttctcttattggttgatgaataaaacactgcttggccaataaaggcaggaagataggcaggcttaggagacaaggagaatgctggggagagaggcagagacacaccagggaagagacaccatgtagccgagaaaggagtaggaggtccggacccttctctggtaagcaaagaccacgtggaaatacattgacttacagaaacgggttaataattaagacagagctagtcaataagaagccctagccatcagttaacaatttaataattaatataagcctttatgtgtttatttggagctgaagcgacagagggaccaggcaggacaagaaaactccagtaacagtcagcaaccccagggatcctcctgtttcaccctccccagccctggaattacaacatgtgccaccttgcttagttttctttctttttttaagatttattctggggctggagagatggctcagaggttaagagcactgactgctcttccagacgtcctaagttcaattcccagaaaccacatggtggctcacaaccatctgttatgtgatctggtgccctcttctggtgtgcagatatacatggaagcagaatgttgaatacataattaatacataaaatcttttaaaaatgatttattctatattgtgtgtttgggtgtttcacctgcctgtatatctgtgcaccacatgtgtgcagtgcctgtggaggccagaagaaggtgttggattttctgcaagtagagttacagaaagatgtgagctaccatgtgggtgctggaaattgaacccaagtcctttacaacagcaaagactgctcttaactgctgagccatctcttcggcccccatgcccagccttttgtgtgagttcaagggaatgaactcaggtcttcatgtttgtacttcactgacagagctttctccccagactcctagtttgttttttgtttttttgtttttttttgtattttatttattttttgttttcaatgcaccgtgatcagtttcccgtccctccactcttcccagtccccgatacctctcttctcctgaagatccactccttctctgtttcccttcagaaaaagcagggattgccattgaggatgacataacaaattacaataagaccaggcacaaaccctcattattattaaggctgggcgagacaacccagtaggaggaaaagggtcccaagagcagatgaaagagtcagagacacccccactcccatttttaggagtcccacaaaagcaccaggttaaaaaccataacatatgtatgcatgcatgcatgtatgtatgtatgcatgcttgtatgtaatgtatgtatgtatgtatgtatgcatgtatgtatgcatacatgtatgtatgcatgcagatccggcacagacccatgcaagctctgtgattgctgcttcagtctctgtgagccagactcttaattcttaacaataatgtttgaagttctgctcataatgggtatcagattaatgacttctgtcttgaataaactatcagaatactgatcttccctagtctgattttaagagggcacactcagtaaaaccacccagttatctctagaatggaaactacagtatgtgagtgactccttgcaaactaggagtgtttgtttccttattagaaaagcatgctggcactagccctggtgactcagtgcgtgtgtctgttgctttctcttgcatttgcacatgaagtggcttccttgaatcatttttctttgcttgatttttctagatctaaacaggatttcctatctccatcctttcccatctcattaaagccctccccagtctaggaattctctcattcacagtacatgttataactggttgtatttattatggttacttctgtgataagactgtgagcactcaaaagatactgacaggcatgtgtgatgactgcatgttcacatgtgagcgaccagcatgacattctattgaggagagagagagagagagagagagagagagagagagagagagnnnnnnnnnnnnnnnnnnnnnnnnnnnnnnnnnnnnnnnnnnnnnnnnnnnnnnnnnnnnnnnnnnnnnnnnnnnnnnnnnnnnnnnnnnnnnnnnnnnnnnnnnnnnnnnnnnnnnnnnnnnnnnnnnnnnnnnnnnnnnnnnnnnnnnnnnnnnnnnnnnnnnnnnnnnnnnnnnnnnnnnnnnnnnnnnnnnnnnnnnnnnnnnnnnnnnnnnnnnnnnnnnnnnnnnnnnnnnnnnnnnnnnnnnnnnnnnnnnnnnnnnnnnnnnnnnnnnnnnnnnnnnnnnnnnnnnnnnnnnnnnnnnnnnnnnnnnnnnnnnnnnnnnnnnnnnnnnnnnnnnnnnnnnnnnnnnnnnnnnnnnnnnnnnnnnnnnnnnnnnnnnnnnnnnnnnnnnnnnnnnnnnnnnnnnnnnnnnnnnnnnnnnnnnnnnnnnnnnnnnnnnnnnnnnnnnnnnnnnnnnnnnnnnnnnnnnnnnnnnnnnnnnnnnnnnnnnnnnnnnnnnnnnnnnnnnnnnnnnnnnnnnnnnnnnnnnnnnnnnnnnnnnnnnnnnnnnnnnnnnnnnnnnnnnnnnnnnnnnnnnnnnnnnnnnnnnnnnnnnnnnnnnnnnnnnnnnnnnnnnnnnnnnnnnnnnnnnnnnnnnnnnnnnnnnnnnnnnnnnnnnnnnnnnnnnnnnnnnnnnnnnnnnnnnnnnnnnnnnnnnnnnnnnnnnnnnnnnnnnnnnnnnnnnnnnnnnnnnnnnnnnnnnnnnnnnnnnnnnnnnnnnnnnnnnnnnnnnnnnnnnnnnnnnnnnnnnnnnnnnnnnnnnnnnnnnnnnnnnnnnnnnnnnnnnnnnnnnnnnnnnnnnnnnnnnnnnnnnnnnnnnnnnnnnnnnnnnnnnnnnnnnnnnnnnnnnnnnnnnnnnnnnnnnnnnnnnnnnnnnnnnnnnnnnnnnnnnnnnnnnnnnnnnnnnnnnnnnnnnnnnnnnnnnnnnnnnnnnnnnnnnnnnnnnnnnnnnnnnnnnnnnnnnnnntctatgcttagcagttctgacccagtgcctctggagtctagcccagaagccccaatttttaataagccttctctctccaaggtgaatggaggtgatgggttcgtagagcccctttgagtgccttttaagtaaatggttgaatggattggatcctaacaggatttaccaagccctttacctctggatcacctcattgctttcattctatttctctttaccataggagaactcatcatgtggtgggggtatgtactaggttaaatccataccttttgaattcataccctctaaattcatatccttcccagaaactttatttaattttttggtttttcgagacagggtttctctgtgtagctttggagcctattctggcacttgctctgtagaccaggcttgccttcaattcacagagatcctcctgcctcggtctccagagtgctggaggtgctccagagcaccactgcctggtgaaactttatttttttaaaaaataatttatttaaatttatgtgcatttgtgtgaaggtgtcagatcccctggaactggagttacagacagttgtgaactgctatgtgtgggctggaaaccaaatccagttcctctggaagagccgccagagctcttaacccctgagctgtctcttcagccctcagaaattttataatatgatgtaatttgtaaataggtcattggggatacactttgtgttgcagaacttttcccagatgatatgaacaaatgcctctttgccccagacatggcaccaatggtagaccaaagaaaagatttcaagtccagatggtgaaccaatgagtttgttgatcttatttatagacacataggtgaagggctacttatttacagggagtgtgggagaccctcaaagagattccttgctggaaaaccccagcccagcctgtgtggtgacatgtccaaagctgtgtagatagagtgccctattcattcagtggacctttaacctattaggtactgtagtgcctccttaggtcacatgtggttggggcaggaccatatacaactggaagaaggcaggagggaacaaacgactggattctcaggtaagggtttgatggccttattcccattgtttccatcaaggaatacagtaggcttagtcttgggagggttctgcacaggtatgcatagctgctttggtttcaagatggcagcaggtcatgacatgcttggaggatgccattccacagcacctagttaagatgaagccatactggagcaggatgggtctactgagatggctggagaggcagagggagaaggccatgtgacaattgaggctgagatgggagtgctgcatctatgagccaaggattgctggtggccatagcaagctatgaagtgggaaggaaggttctctcctcgagcattcgagcattcggagaggctgatagcctcgatgacagcttgatttgagacttacagcttccagagccgtgagagaatgcatgtctctcatttgacacaacccagtttatggtgctctgttatggcgccgtaacataggaaactaattcatggctctcactgtgatcctgccaacatgcagagaagtggctaagctctcaatgtcagcatctattttatatatctgtttgattacttttaaagagtgtgggcattcaactattctcaattgtcctaaactagataagtggcttattagcatttataacaaccttttcttaaaatgcccctaaatatgtgggaggagaggacctcagggtatagtacctgcttaatgtgggtgaggtgctaggatccactcttatatagaatataaccaaacatgtgtgttcttccatatttcagtcaggtaggactttactatttatgagattataaaagtaaatacttatttttaataagaaacagaacactccaaatttttgtaactgaacatacatttgttttgtgattatgttgttaattgtgaattcatttgcagttactctttcctcttactaaaattcaaatagtttcaagaataaatctgatttttcactggtttgaagtgatggagatttttttgtacaggacgtttgtctattaaaattagacctggatgaaaaaattcatagatgaaattcctttaagccaaactcttatttttcggggtattgctttgtaattgctaaggtatgactaataaagatctgttttaattgttcactttttagagaacctcttcagtctcctgcctcgtaggtgggtgacgtagaactccatgacacaacagagtcagggcaatgtgttgcacgcacattattttttttttttttaatgctactaaaacactcaactgagtcattttctctgaccgttcttccaatgtggaaagaacctaaatcaaagaccatgactgcttttattggcaaacagtagataaatcagggatgtaaaaagggaaacaggattcggcacaaatgagtctcggaatggactctctgggtgaaaggtttattctgccggttttcctcttgagacacttaggtttaaggaaatgtttgcgctgctctagagaaatagtaggttgtatgtttttcctttgtgtttggatcactctggaagtaattccttagggcacagttatctaacatatggcaatgtagaaagagcccgaagcaaaggtcatttggatgtttcagacaggaacgaagaacatccatcttaatacgactcaggaagggtgaaggcgcagcctgtggtcagagggccggcgaaagggaaggggtgcaagtccacacagaaaacaaaactgtggtttttgcttttacttttgtttgtgtttgattttacatgagaactggttgtgtgtgggggggaggaaatctgttggtgatagacaaggagtgaatcagatcatcatgccacctgtacttgtgacctgtattgctgagcaaagcactgaactcagtattcccacaccggaacctattgttgctgtcttaaaactcttaccattttcttttactaagccttattgttgtagctggtcgtgggtctgcaaattactcgacagttctgcaaccatggtctattctaaactttgttcttttagatgaggaaaataaggtcctagaagagaaacgacggtcctgcaaaagcacagccaagaacagatgagtctggcttctctaggtcaaaactgcagctgagatcaagtttaaagggtctaagcaaggagaaatgccttcccacacacactgaaaagaaacttagacagcatcacaaatgagccaaatacagcatttggaagtgagttctgaaggacataactggatttgaagcagacctcatactgatttttttttataggacatgtctaaaaaccataggctctcatattgagtttcctcaggtctggggtctggggatgctggcatttgcccatcgtcgtctcacccaaagaaccctgtggtcaggatctctaagcagaggagcaagttgaatggttctgctagtatctcagacagccaactgtcctactctgttcctgaccactgctgtcccaatgaaaatgggttaatcttgataatggtgtatgttcttcttgcaaagctggaaagaaaactaagaccagccctgtatcagctatgcaacaagtggtattacatgctggaactgaaccttgtggctgcctatggtttccaaatgatcccaaggttcattctcagtacattgtgtccttaggcacagtactgtcaggactcaaagtcctggtggattatacatgaggcaaggcatattgaatagttgcttttacgttttagatgggagtagaaggtctgattttagccactatgtctcagcttactctccataactctctgataataaacaacatttaaaaaaatctattaataagcaagttcgtaactccacacacacacacagcaaactgaaactctgaaggaccagaaaaatccagggaatttttcagatgcatttcttcctatgagaaatctttaactttcagttccctttgtgtaaattagatgactatctaggttgctattagatgattcaggaagaaaaggatatttgaaatagacaaacacacataccaccacactcaaggagactgaaaagcatccgccattttcctgatgtcctgcacacccagtttcgtttgaggaggtggtaaggatctccttggcaagaagagacactcttctgtaaaagagatagtcgggaatttcttacatacctggtgagggtgtagaagggtgaggcatcagatatttgccatgtgagggtcaagtagagagtggaaataatacaaggaagttctcctgagacatttgtcttggcagcattcggtatcacagcatgccggagctgaatacactaatctttcacatgttgtttttgttttggaatcactgtgtagttagcctcatcttgaacttaaggtcctcctgcctcagctttccaaggtcctcctgcctcagctttccaagtactgggtttgtaggcgtgtgccaccacatgcagctaaagtttatagatgaagaaaccaagggctaagcagtctgtgggggttgttggccagttgtaagcaaaagtgggccactagcctctaagtatatttctttcacggaatgtggtgtctgggaaaacgctcactggggaggacttctgtgaatacaaatcagtttgtgttaaacatttgaggcacagtgaccttgacccaggacattagcttttcaaggcgcaatgtctttaagttggcttgggttttggctgttgtgaaaataacagaggactcatccctagtacacatctcaaatgctctacaccttggtcacaaggacaaagatgaaggaggggcagagctgatgactttgagccactcagagaggctaggtcttcatagtcacagacacaacagcagcctaagagagcacaaccaaggcccagccttattcttcagcgttctgcttctgcagctgaacttcctattgacccatggaacctcaagttccttaatatgcttctatttggcatgaaacacagctgaagaggccgagcaaggagcatcaggaaacagctctgatggacttcagcttccttaaggtagtggcttgagaagaattcaggaagacagagaacgctgcccacttacacaaagctagccatcactgctgtgtttctgagggctgcatgttcttcaagttgacttcagaatgaaaacaatgacactagttacaaaaatattgctatgccaggcatggtggcacacacctttaactccagcactgtggaggcagaggcaggcagatttctacatagcaagttccaggtcaatccaaggctacatagtaaaagcctgtctcaaaaataaaacaaaacaccattgtctctggacatagctagttgatctatctatgcacatatatatcaaaggtgtatatgtatagatctatttaaatatatatctttgaaatagttcttaattgatgtatgcctgtaatcctagcatctgggtggttgaagtaggatatccgtgggttgtggggcagcctgggctacacagtgagatcctatcttcaaaaccccaaattttaaaaatgaaattaagctacacatggtaacttgaagaagttaactggacaaagagagttcattctacttattatcaaataatgttcagacccatgaaagctgcttataaaatactttctagctatgtgtatgggtgtttacctactcctaaggttgagctgaagtatcaattgagcccaggaacttgggaccagcctataggcaacatagcaagatcctatctcaaagaaaaatataattaatacatgttaataaaaatgttcctcaaggcatatgtcttaggattttcattgctgtgaagagacaccatgagcatgacaactcttataaaggaaaacatttaattggagctggcttacagttcaggggtttagtccattatcatcatggcaggaagcatgacaaacatggctataatcaaaaataacttggggagaaaagggcttatttcatcttacactttcagtaaacagtcactgagggagtcagggcaggaactcaagcaagacaggaacctggaggcatgaactgaagcagaggccatagagggatgctgtttactggcttgctgtccatagcttgcccattctgcttccttaaacaacccagaaaaactagcccaggagtggcaccatccacaatgggctgggccctctcaaatcaatcactaattaagaaaacaccctcacagacttgcctacagcccaattatttggggagaagttttcttaattgcagttctctctgctctggacggcaactctagcttctgtcaggctgacaaagaaaacaaaacaaacctaccaatagccataaagagaccaccagcagcaaactaaccaggaccgggaggcttagccttgatggaggaagagcatccctgggggtgggatatgaaagtgaaaatcatcacctagttctaattgctctctgagctccatgctttcacttaaagagatgagctctcagcttcctgctcctgttgccatgcctcctagatgtgatggacacacatccctctggaactgtaagcccaaataaactgttttctgtagttgcttttgtcatgatgttttatcacagtaacagaaaaagcaactagtacacctgcccacatacaaagcccgctctcaagggctgctttttacggaatctgaggctaacacaataataataacaataattcctgtactggcctcttctcacccctgattaggcagtttctcccactttctttcccaactctgacatcctgtgtggcttccagcaactaatttatccctgacttcaacctgtttttctcattgaagcctacagtactgatgtcctaaatcccttacaatcctcaggtataaaaatgccttgattctatttcccctgagtccaaatgctccctaatttcagtggccataagccctggataaggtgagcccagcactgcatctttaattaggtactccccaaatcccttgtggtatgtacagtttggtttagtaagttatatcaagggcattttatgtgagggggatggagtgtgaggattattaaaccatggtttctaaatagctttggatgtcttgaatgaaaagtgtttttcaaatatatggcagtgcttttagtaacagacattgccttagcccacagaataatttttctttgggggaaatgcctcctctagctaagcctgggtagactgaacatgctgtagcaattccatacttgacagcctgggctgctacaatttatccacccattgattcagaaacaatcctagatatttatcaggtgccaggaactctgctagatcctatagattaagaaacaccctctcacctctgggttgctaacatctgcaggtgggggtggagtggttctgggaggaaataaacaagtgagctgcagataactggtgaaggaggaggcaaagtgctggggaagtctggaagaaagcagctcagatcctggtcgatgtcacaagttgtcataggggatgcatttagatgaagcttggaggggagcagaaattttatggtttttttgtgctttttttgagagagagagagaaagaacatgaagttgggtgagtagggaggtaaataaaacaagtataattttattagtttatactcctcctaggggcagaatttggggaggggaaagaatatgatcaaaatacattatacggaattcttcagtaaataaaaacaaaacaaattcaaaaggaaaaaaatggattacatttagataaatagcagcttataaaactttatagaggacaccacatatcccctaatttaatgtgtgtgtgtgtgtgtgtgtgtgtgtgtgtgtgtgtgtgttgtttgtttgttttcttgatttattttttaagatagggtctcacacagctagccttaaactcaccaggagtgaagggtcaccttgaactcctgattctcttgcctcaacctcccacgtgctgggattacaggcacagcattgtgtttggcttaatcccaccccatcccccattcttaacattttacattttcatggtgcatttgtcaaaacaaagaattcaactttggctcagtttataaagtgcactctataaccctttttaaattacctctattttgatattttgtatgcatgggtgttttgtctgcctgtatgtctgtgcaccacatatgttcctggtgtttccgaatgccagaagagggcagaagatcccttggtgctgcacttgcagaaggttgtaagctgcccgtgggtactgagaattgaacctggtcctctggaagagcagccagtgctgttaactgcggatttctccatcctctattagctttttcagtgtcaccagttttcctagcaatgtcccttcactgttcttggatccagttaaggcaaccacaccttcattgttgtggctctttagtctctggtctgtgacaatttttgtcttagtttatctccatgctgctgactatcttgagagccagacatgttgtaaaatgttcctccctctagggttgtctgctgttggagaagagcattgcagaggagaactgtcattcttagaccatgtcaggggccccatagcccacgaacatcactggagatactgggttgaaaggtttatgtataaggtgtagggatacacagggggcttggtggcagtgaaaagtccagtgaacctacaggtggggtgctggaaagggagtggtgacaggaaagccatgtgttggtagtgcttgtattttcataaaagattttgtgggaattgtttctttcaaagcttagcagtacatggtattatgtatcatattatggggaatattgtggtccttgttaaaagatgaggaaagaggctcaaaccgatgaagggaaggcagaaggtcacacaaatagttgcaaagccaggccttacacacagccctcctgattctgaccacagtgttctttgctcattatcctggtcactgcaaggggatgatgggacagtgtatatgtcatggccgaaaccttatgctctctcccaacattttagctaaaccgtactcagtaaagctgggcaaagtgaagccagttcctagtctgaagacatgaaaacctgcgcagggctggggacatttccttctttctgtgttgctactcaccacgaatcttgcacttatgtcctgaaaggaatataccactgtgcctctgagtgtggcactgtttgtcactcccagcagcaagagctcctggtgtattctaccagcaatcaagacagatcaacatactctttggacagagagctaactgcacacttagttgacccagatacagatttcatcaaggacagtttgaaaagagagtgagcagtttctcactccttcttctctaacaagctatgagattttaccatggcagaaaggaagccccaagttggtgaatcataagttctcatatatcaccttctttggatcttacactcattggctcatttcacaaacacgtcacagaaacacccatgtgttacataatacaaaggtaaggaaaaatatcagtaaatcattttgtttctgagaagctcaccagtagaaaaaccagcaagaaataaaacaaaatcaaacaaacaagagcctctgtgagctttaaggaagggacgatgggtgctggagctgggtgtgtgggacagcaaagggcttgggatagccagcacatgtaatggctagaggagagaggaagagtgtaagctactgtttcattgctgtgataaaacaccataaccaaaaggagcttatagaagcaagagttaattttggtttagagttccagagagttagagtccatgatgataggaagacattggagcaaactggatggaggagctgagagctcacatcaccatctccaaacccaaagccgggagagcaaacgacgtagagcaagaccttaaagcctcaaagtcggctcccagtgacatacttccctatccaggacacacttcctcaatcttcccaaacagcaccaccagcaggtgttcaaatgcctaaggttacgggcaagcaactttttgggatgcaacactgctgggtcttctgaaggggaacgactggtgttgctggagcatggtgagggtgttgggacagtgagaggcagcacagggcaacctaactctgactctagccctgcatctgggagtggatggagacttccaaggggaggtcctccagcctcctcccttcttcactgccatccatcagccagctagcaatttggatcttcctacttgatcttggaagtacaaaccctttgtatgtgttgatagaataatagcatttggcttgagatgggtaacagactctcttgcaagccaactttgcatagctccaggctgagtagaaacatcctactgtccttaatgtagtcttcctgtacaacttttattatcctgtgtcacgtggcttctctatagtccccaaagctgctaaatgctttaaaaaggccaggatttttccagctctgatctcattagatgtacaaattccaagagcagcctcccagaaaatagaaggttttttcaaatttatttttttataaaacagagtggatgtgtgcatgaaagatacattgtttattttcttggcacagacttaactctaaaatgagattacttaattggagcaaacatttcctgacatgctgagaaggagtatttgaaccaaatctcctctcttagattcagtcttgggtgggtgtgttttaggctgtttaaaccatgcaaatctcaaacgcaatctctcttactaccgaggcattcagttggtaaggcagaatgtaactggatacaggcggcaacagcttgtgatcaattatgggaaagttcctggatttgttgttacagtagtagtttatttatttatttatttatgggcacagagcatattaaatctggaagcattcagtcaaattttttatagcacaggtctgttcctaactttggtgtgcagagtaccacaactcactttcactggtcttttgagctatttttttagacttggtgtcagtattacagtatgcaataatatatatattatgcatatgtaatatgtattcttatgatatatagactaactttaattctgtaaatattctacaatagaatgttatatataattatatgcagctgcatgatctatatgatttactattttatataataatatttatactagtaaaactagtctcagggcttcagagatgctcagtggttaagaacacttgctgttcatgcagaggacctgggttcagttccaagccagcttacaaccacttgtaactccagttccaggggatcaatgccctctatttgtctctctctctcttttttttaaagaatttatttatttattatgtatacaacattctgcttccatgtatatctgcacaccagaagagggcaccagatctcataacggatggttgtgagccaccatgtggttgctgggaggaattgaactcaggacctctggaagagcagccagtgctcttaacctctgagccatctctccagcccttctatttgtctttttaagcacctgtatctccatggtgcacattcatacactcctgcacacatacttacacattaaaaaaacccagtctgtctacttacatatatgtggtagtttgaatgtaattggtccccataatctcatggggagtggccctattaggaggtgtggctttgttggagtgggaatggccttgttggaggaagtgtgtcattgtgggggtgggctttgaagtttcctgtctcagttgacttcctgttgcctgcaagatgtaggactctcagctccagcaccatgtctgcctgcacactgccatgatgataatggactgaaccgctgaaactgtgaaccactctttattaaatgttttcctttataaaagtttcatggctatgttgtctctttacagcaatagaaaaccttaactaagatgatatatgtgtaaatatttttatatagtaagtatacatacatacatacatacatacatacataatacatacacacatatcctagaggtagctagcctttgttcctgggtgggacaaggaggtggctacctcatgagaacttatttctaagtttttccttgaatcaggtaaagcactatgataatttttacctccagaatgtgaatgacatgtcactccaagaactgggtttggatttggggctgccctctacagacctcttgcctctttgagttggctgaaatgtaggcatggagattcagttttgactagctgggtaacggcagcaccctaggatactattacaacatagggaagggaacttgggcagagtgtctttggctacctgggttgtttacctccaaactgtgtgaagaaaataaattccttagtttgctaagccacattatcagacagggttcaatcagaaagccaaatcatagggctgggcttatagctcagttggtagagtgcttttgcctggcacgcacaaggtccctatttctgcagccatatttgctatgaaatgaattctttgatcagaagcaatgctgtgtagattggcacagagtggctatgacattctctaaggcacacatagtcacttagaagcattataagaaggaagacaagaagggcgagcatccgttctaataagaacaaagtgctgttacagaaacagcccaatgtaatcaaccagcaagtagctggctgacctctctgggagctgtgccaatgtaggagctcaaagactgggcagattaggcactcagtggtggttttagctgcatcaaccctgatgagtggaagtctaagtacagagcccatgcagaatttccatccttgcctccatggtcacattgttcatgagctcactgggtaacgataaaggtggatatagaaggagagtggctgagcaggccagcctacccacctgatccactctcccgtgagcattcacatatatccttcatgcccattcagaaatgcatattcatggacctttacctatatctcctaattatcagttttcagtcaacttcccaggaccctgatcactagccaagttactactcacagagatggccagcagctaagatgccactcatagcttgactctacaaagattatccctgtgaccattcttccttctagatgagacaagtgataatgagttgatatctgacctaggagacacagtcatgtctgtttcccaaatgattctactacattactgggaaactttgcagcttatctttagttcatagacactgatccttgaatgctatagcatgtatgattctactccagcagccttctatctggccacagacatttcaccaatattttttagtaagtggatggatgtggtacttgaccataatactgcagagactttctgaggacaatcaaatgtaggaaaagtctctacatctgcccagcatctgagattgcacaacacataaacactgagaatcactctgctgagtatgtgctgaacatctttagaaaatgtggatatgtgtgtgcttgcatatatgcagaagcccaggggtgtcagcagacaagatcagatccccttaaatttgagttacaggcagttgtgggctgctatgtgggtgtggggaactgaacccaggtcctctgcaagagcagcaagtgttcttaactgctaagccatctctccagctcttacagtaacttgtaaaatactaattgtgggactacataaattttaaagagcatgacatcaattgtgtgacattaagtttatttcttgtcttggttgaacatatatgtgtatccaagcctggagagttatagctactgccacagaagtgctcacaatgggcagagaaatgtcttgtttattaataattatgtctctagattgctgaatcaatctgttcttaagtgctttgaggccaaagcccattccaacactggacttgttttatactctcttcagatttctttggtgtttggcacatgatactaatttataaataatacccagagaatgaaggagctgtttatcaagatcatgtcaaacactagtaacttactgagatgtctcacgttgctgaccagacagagtggcatctgtttagaaagacctgggctggggccaggaaagctaagttcttgctttagctttgcctctgcctgcctatgtgaccttgggtaaggcctgcatttttgatggactttgattttctgatctgaggatatttgggaattgaacagcagccatgggaggcccttggaccccaggggtgttttatttagagggcacaatgttctaaacaaaacaaaacaaaacaaaaaacccaacagtatttgggggtgtggatatagttcattggacagcacttccctagcctgcacagagccctgtgttgaatgctcagtaccacataaaccaagtgtggttgtgcatgactgttatttcagtacttggatgcagagtcaagaggatcagaaatttaaagtcaccatcagctaaaactcagttgaagattagcatggctacctgggaccctgtctcaaatcaaacaaatgaacaaaccaaaccaaaccaaaatactcctatatttcgatgcatttggccacgtgtactttctgatttgctagagttttcacttcttcctcacatctttggatatttgagtcctaatctggcccctggagccacctgaccttataacctctgaatatgacactcttcagtattgacattgtccatgttcaagccagggcaggaatgggaggctgctttatgatgctggatacacagtcccagaatggggtctggaacgcaatggatgcttgttgaatgaatgaacaaatggataaatgaataaatgaataaaggaaaattctaccaaagcagaccttatggaaagggatgtgggggaccatattgggagacttctctctaaactagcaaagttgtttctctttctgcatttgagattgagtaggaacatctcttgtcttctccaacctctcaaggtccctaggggaaatgacatcactgtaaagattccatcttcagttgaaacagctttgtttaagcactaactgccaggaaccaaaaggatttcctatgcaaaactgaccgccttgtgtagtcctcagtcctgtagacactgctcagtgtcctcagctgagtttgtgccctgtcttctgggaaacttaatatcagctactgcaggacacagctgaggaactcctggaaagcgtcccttacggatgttaatttctttttctttttgagaatacagacccacagcattgaagctaactcccaatacaactttcttctttctggaagctgttaaacattaacattagattacatacatgtcagcagaatatcccacacaggcctctccctcagcaccagtgaatcccccagtgcatctcctctggggggcaggggtaaagaagaattggctcacttttatagccacggtgggaggagtttctgaagttgtaccttagtccattagaaacaggactaagccacatcacactgcctcttggacaagtggacaagaccagctaggactagagactcgaagagactgattcaatttccaaagttaactagaaattaatgttgaattcatcaatatttaggctatcaccttagatttttctgactccatttatttgctgtataaatcttcattttggaggttaatagtgtaacttgatgaattttgttcgacaaacccaggaagggaaaccctacatagagagggctgagccaagttttctccatagccgtatatacctatcatctcagcattcaggagatggaggcaggaggatcatgagtttgaggctagcctgggctacccaaagacaccctgtcaatgaagagagaggagatggagggaggaaggaagggacagaagaaaaggaacaatggaggccatggcctggaagctgaggcctgggtctgaacttcactcctcttggtagagtgacatttcatttacaatgtggacatagggacaagggctagatctggtctgtaccctcagaggccacagtggtactgtctgagaatgctcagtggggactggcatctctccccagacatgcagaagaggcccttgttttccctgggctagttctgtttcactggaaatatcccagcccaagtttctgcttttcatttcccctgtgtttgtggacagagaagccaggtgctttcactctgctgtggctgcccatcagggtacacagttgggggagccttgggaaggtaaacaagtgggggaatctgggcctgggaggtcgcagttttgcctttacaaattaggctgagctagcacaggaccatgtcgtgtctccgtaaagggtgagtctggacggaaaactgctaaatagccaagtgaagtttatttctgcatcactggcttgcattacgtattgattatctcatcgcctgattaaaaataaatacgtgaaaattccttttaacagagaagggggaatagcaagcttctgacttgagacagaagtgaatcatgtaaaaggttatcacatggtgaccttgaggacagtgaaagaagctagggggctggtttggaagaccaatcctctaacattttaaacaggaatagcctgcttcgttacagagttgacgcctgatgacatcacttccaaaatttagtacgtgtacaaactcacagttttctctggtgcagccaccttcgttatctccaaagtgaacaaaggtcattaggatctaattgtacttgtaagtgcttttgtttggggtactttctcatcaccctgaaaagagttcgagaactgtaactttctgccctgccaatgaattagcctcagcttggggcattctaagaagtttcatgatgagtgaggaaatcatgacgaccacatgtcaagctagaactaaaacaaatggatgtaggtcacgacctgtgatgaggtcatttttttttttttttttttttttttttttttttttaccatgcatgcctacagcgagggttgtgtataacttatatgaagacaggacactcctctctaccccttgcctcttccaccttcactctctgaagatgaatctacccagtttttccaactggttatcttggtatttatgtcctgctatggagggacataatttagatgttaagagctctgtcttcagtgtagcagtgtagcgagatgatgcggacctgttaataggtgggtcctagtgtgaagtagttactgaggtcactgctctaggaaggactagatatagctctagtagggcttaggtaattcatgatagagggttgctgcaaaagagtgaaccagcacgtgatcacaccctatcctgccgtgatgccacccattataaggtgatgcaaacaggcaagccccttgctgtagctgtttagactcaaactgtgagctgtagagatctcttccccaccccatccccccaaactgtgcagcttcagatatttagttacagcaatggaaagtgtattaatgtagaaacatgtttctaaatctcaggcttttactgctaatccttgaatttatacttttaaatatcatctgtgatatttcaccataaaaataaagatccccttagcactgtcccactcacattcccaggattcagcactgccccaccctgcaatcctgaaacagattacattcagttgtatggatgtatatggtcccatttaatgcccatttagaagctattgacaacggaactgtgtggtctattcagattgattttcttattttttattctctctctctctctgtgtgtgtgtgtctctgtctctgtctctctctctctctctctgtgtgtgtgtgtctctgtctctgtctctctctctctctctctgtgtgtgtgtgtgtgtgtgtgtgtgtgttaggatacatgtaccttgtgagtgtgtggaggtcagaggataactctggggttctcccctcccacctttacatgggttccagtgatggagctcaggtcaccagtctccctggcctcttttcccatttgaaagtcccacatggctatctgatatcttgagttccatgccctgggcatttattaagctgacatgttccagtaatatctttagctcccagggttaagacccagatttattgtttagatgagtcacataaaaagctcccagagtccccttctctggccatggtgtgctagcacgatcctttattttaaaggtgttctcttctcttagccctcaggcagggctattcgctcttccttccttccttccttccttccttccttccttctttccttccttccttccttttttttctttcagttttttttttgagacagggtttctctgtattgctttggaggctgtcctggaacttgttcagtagaccaggctggctttgaactcacagagatccgcctgcctctgcctcctgagtgctgggattaaaggcatgcgccaccagttcccaactatgtgttatttctaatcagacagatttatattactcagtccattagagctgaagggcccaggatttgaattgactccttggtggtgagagagctttgctggggaagggctcaagtctggacattggtaagctccacagatatgtgcccggggctccatccagccccacactcgggcaagctgctttcagtgccaaccacattttctgcatgtgtgtttctatgtaattttcttcatgtgtgtgtttctatgccattttcttcatgtgtgtgtttctatgccattttctgcatgtgtgtgtctatatgtcattttctgcatgtgtgtttatatgccatttttaagcaatactttgcagcttttcttaggagacccacaaccagaaatggaggaaaccacacaggccagaacaaaaggacactcgaggtactgtttggagaacacgtggaagatgttagaaaccacaacatcccacacctgtagcaacacaacatcaactacagatgtgtgtgcactctggagcccattttagactcaaatgtatattgcttctaagaaacaaagccaggctgtgtttgttcgggcccttccagcagatgcctgaccaggcagaggttgtgcctctgtagcgaagagaagacttcatcttcgagggttactgtaactaaagtcaaggtcatcaatgacctactgttagcgcagttttggcccaggaggttcttcttgttcattcaaagtgaacagaaagcccaagcaacccaaaggacttaggaaggcaaacagcagctgcccccaccccccatcactcactccttactgtctgaaagtataacctgtagcctctgaattagttctatgagaaagaaattttaattctgtcagttttaactccctcccaatggtatcttctaaaagtggatccagggcccagggagggagctggagtttggttaggcaacaggaaactttccattgacgatccgagtaccttatcaacagattttatctttgttagcttcctatataaaccccagccataaacaccataaccatgagcagtttcactgttcagaatatatgaatgttctcaagattgatggctatctacaatcttgggtcagatccaaggccataaactcctgtgtgttatgagaagcagaagtgggcatggaggccgtgtgtgtgggtgttgtataacaccttaggaagccttttagctgggggcttttgtttccatttttgttttattctgtgttgattcccagggtctttctgctgaagacagctatgaagacatggacatggataatgcttggtgagagagatgctaaatgctctcctattttgctcctggagtaccttgaagcactgacagggctgtgagacaattagcttctgaaatggcacactccctgttctgttcagagggcttgagaggcccatatatcttctttgaaatgcacaaagtgataaataaatcaaggtgacttttgcctgtgaggttaaagagaagtgtcttcagttaccaagtctattaggttatatactgctctgtaacagtccaccctcaaactgaactttagaacaataaacattcgttatcacactgtttctatgggacaggaattcagaagggatctagctggctggttaggcttcaagagctggctcagagtgtgtacttctaagacgactcccatacatgttgtcaagagattgcagtttcttggcacatggggcactttccctgggcttcttcagtatgcatgacacaaagactgacttcttccagagtaagtgagccaaaagaaagcaagtagaagccactgggtcttttatagcctaaacttgggagtcacacattgttatttgcacaatagcctgttatttatataattcagctatacaccacagtggacaccataaaagtggggataccagagtgaccccctaggagcaatgtcaagggttggctaccacaaatctgaacaatactgacaaagaatgaagtgagctacaagtggttttgaagtacgggtctaagatcagcatgactttgaatgctttgaatatttgtttatgtgccctcagcttaggttggtgcccattatctgtccaaggtcactggacaggctctgagtgtagaattggcattaaatgtctgctgttctggagagagtggtgagtataatactggcctattccacttagttgttcgagcctacatttcttgtacatgtgaaataatatagttacttcacaggcttcctgtaactgcaaactaagaaaccatagatagcacctaagcacccagacactggtaagtgttttataaattctgattgcttttgccactgatgtcagcttgagagatgaacacggtacacaggctttgaatgctggctctcatgtaacaagacctttagatgttggccagttttagatttgattaatgcaatggtttgatccttagtaagtgcccaggttcttctcatctttcttctctgccattttttgtattctcccctcagggctgtaaaataggtgcagcaatcgaagcatcagtgtcctcatgtgcatcactacagccaaataaataccttagtcccgtgtgtgtgtgtgtgtgtgtgtgtgtgtgtgtgtgtgtgtgtggggaggtcacgtatacttgtgtgggtgcatggacatttggaggccagagggcaaccttgggtgtcattccttttctcatcttcacaaagatttcctctttatttcttgagacattgtttcttactggcctcagactcaccaacagttaggctggatggctggccagtgagtcttaaaagagctccctgtctctgcctccccagtgctgagattgcctctacccatgacctttttgcttgtgtgctggggaccaaactccttgtacttttaagggtccttgtacttcaaggcaaacactttatatactgataatctccctagttcccacactgcctcctttaaagtgtaaaagcatcttcctgtattctagtagatgttcccatatttgattaatcctagccaagttaaatgcctgtttctaacccaatcattggcaagaaagaagtggggaatcaccagttactgacttagattaattgaagctattccttatgcttgaagaaaggcatggcttcctagaagcatatgtctgtgtgagacaggagtttgtgggtgagtatggtagcccagcaatatattacagggtatgaggaagataaaatgttgtgcatgtgaaaaatgtctgtattctgagtgtgtgcttaaagcatactttagctggatatagaattctagactgaaaagaattttgccttaacacttaaagatactgctctattttgcttttattcctagtgatatttttgagaagtaattatgattcttaatttttgatatggtagaccagatctcttcctgcaagtgtttttgaagtatgattaatttatgaattcctgaaatttttgttgttgtgttgggtaagcctcattcttagtgttgggcacttatttgtccatctagtttaacactacatcccagcgagttctgggggaatttctttaaaaagcaaattattttcttcactttccttgtagaactcaattaactgctctatctcttgtatttattgtcaagctttctttggggggggtgctttccattttttgttgtttcctcaaacatttcttcaatttcagtttttttttttttttaaagatttattatgcatgcagtattttgcctgcatgtatctctgcaggccagaagggggcacaagatctcattgtagatggttgtgagccagcctgtggttgctgggaattgaactcaggacctctggaagagcagttagtgctcttaacctctgagacatctcatcagctctcaactttagttttcacactctcactgaattcatgtctagttcatacttttaatttctgaattttttttctttattttacaaagtttcttttgtggacatccttcttaatttatgagatgataccttttctcattcccccaaagattttgcctagaaggccatttctctctgcttccccagatttttatttttccatattgacttttgtcttttgttagtgacttttcttaaaatattttgtgattcttcgttttctcgtatccaagtacatatgtacttttacctgtttgctacctattagttgtgaacaaaaaggaataaccaaagtctcacaatatgatatcatacccagatgaaactcaggcaatcattgccaatatttattaagtgtgtattctttgttgaacaccaataactatggtacaagttacaactgagaaaacagaggcttacagtgttatgtaacctatccaggaccatagagccagagtgaatgtgaattattagttacaaggttgcactgcctcttactaggtgaatgttgtccttggcagcggccttaatttattctttctgtatctcaccattctcttggtcccagcagaaataatttagagataacttgtagtgaagcaggaactaatgacaaagaaagaagtagaaacttnnnnnnnnnnnnnnnnnnnnnnnnnnnnnnnnnnnnnnnnnnnnnnnnnnnnnnnnnnnnnnnnnnnnnnnnnnnnnnnnnnnnnnnnnnnnnnnnnnnnnnnnnnnnnnnnnnnnnnnnnnnnnnnnnnnnnnnnnnnnnnnnnnnnnnnnnnnnnnnnnnnnnnnnnnnnnnnnnnnnnnnnnnnnnnnnnnnnnnnnnnnnnnnnnnnnnnnnnnnnnnnnnnnnnnnnnnnnnnnnnnnnnnnnnnnnnnnnnnnnnnnnnnnnnnnnnnnnnnnnnnnnnnnnnnnnnnnnnnnnnnnnnnnnnnnnnnnnnnnnnnnnnnnnnnnnnnnnnnnnnnnnnnnnnnnnnnnnnnnnnnnnnnnnnnnnnnnnnnnnnnnnnnnnnnnnnnnnnnnnnnnnnnnnnnnnnnnnnnnnnnnnnnnnnnnnnnnnnnnnnnnnnnnnnnnnnnnnnnnnnnnnnnnnnnnnnnnnnnnnnnnnnnnnnnnnnnnnnnnnnnnnnnnnnnnnnnnnnnnnnnnnnnnnnnnnnnnnnnnnnnnnnnnnnnnnnnnnnnnnnnnnnnnnnnnnnnnnnnnnnnnnnnnnnnnnnnnnnnnnnntatatatatatatatatatatatttgtgtggaggtgttttgcttgcatgtatatctgtgccccatatgctgcagtacctgtagaatccagaagagggcataagattcccctggaattaggagttacagacagttgtgagcggccatgtgggtgctgggaatcagccatgtgggtgctgtgaatcaaacccgggtcctctggaagaacagccagtgctcttagccactgaaccatctctccaaccccaacatttactggagttttaaaggggactatgttgattcaagtgaaccatggaatccacaaagataacattcctttatctgattttgtgctgtaagacactggcattagccttgctgactgtctcttgagagtttcagtttcagctgaggggcagattgcttagcagaggctacatatagtttggatcttctaagtaccctgtgttccacatgttagcagtgtgcttcccagacattaatattattgggaaacagtgagactttggggaggtggggtctagtgggaggaagttggttattgggtgcacctttggaggggatcatgggaccagggctggttttctttacctcccaactgccatgaggtgagcattttccttccctgtaaggctcccactatgatgcacctcttgtctatagggcacaaggcagagctcaaataaacttactatcctttttttaagttgtttatctttggtacttgatgaaagataattataacatgctaaagtttactcatggagataatcagctccttaaaggtttgccaacctgaaatcatagaacaacttgaccttggaggactctacgattttacagggaggtggaggccccgggaaggcagacatagggtagttcaggctgtgcatggaccagtgggacccagacaagggaaactgagcagtagggtggggccccatgaaagctgatggtggctgtcactagaagagctggcctccacttttaaaaggtccttgaggcaaggacacaagagtgacacatgaatcagtcaacagtcaggtcagttcctcccagttcttaaaatttggaattctcattggctggcaaagcaacaggaagaggggggtttgtttctgtttacaaagaactgctctaatttttccagtgttttcaaaagaaagtgtttgctttcaatatatttgaaaatctggaaggcgtacactataagtcagtgcatgaagcattatcaactttaaggttagtcattgttttcttgaacacaattccccgtgtttaaagagcagaaagaaagcagagtcgttgtcagcactgggaaagtcagaggtaagtaggagccagcaggtccgattttattcaaaacacacatcaaatcctattccaacttatctttgactctcagaccttcccctagatttgagctgtcttctcggggtatccttcttctagaggtttgcttctgaaaggagctaagagacccctgttctagttgggcacacagtgatggtcatatcccaggttttctgtagctagaaaaaaatgtggccctagaaacataaacttaagtcccaacgctggtgacccagaagatgtatgtaaaacccacagtccagacacgctattaagcatgcctccttgtcttgcagggatgttggagtggagtctgagttagttaccacaggataaatgcatttctcatacaaaacaggcttgcctgatccaggctggttccctccggagacaagagggtgactggcagtggagggtgaacccacgagatcctcaactttcctgggttcctgggactggccagcggggaactaaggacactagctgcttccactcgcgtgcacgagcctcgcgagctgtccccggctcattttccactccgctgcttggctggccggaccgtaaacccaacctgacatggactcattaatttggcagcgactggaaagctgggccatagcggcacagccgggaggcctttgtggacccggggtcaggtcagagggcaaccgaaacaaggctgagccctgcacgctgctgctccaggggctggactcccggcctcctgccgcattgctcctgctcgccttccggagccaggaaccccgcgacccagccgggtgcttcctcctcacccagtaccggagtcttagccgcatccaggtcgcctgctgtcttcaagatgcagactctggggtgcagccacccagggcggatatgaagatgcgcgcttgcagtgacgtggtgatgcgcaggtgcaagcctctcctcggtgccacctggagctctggggcagcttctttggacgcgaagcatctacatttcctcgggtttagtctcttgcatggtctctcacacatgcctgcgcctaggtagcgggcaacaggctgggggctagaggcctgttccttgttttacaagtggctccagcacagattaatttttagcaattttggaaaaaaacatagcggcctccttctgagcctttaggtgactcttgtgacatttagcagcaaagagaactatttcctctgccattcagagctaaccacgtttaattggcccagaagtctgttgtattttgggaaactgtttgcgatatcccatctgttttcatcttggggttcaaacgagtctgtgtttacccttctgctggggaaattggtttacatgcgcagcaatttcggtggacaccgagatattcccttgaactaatgctgtgggtccgacaggctttgtaccgctaatgaccctccattacgtctgtcaggagacatttacacagctccacggtcagttccataaaggaaattaagaccttaggtttatcataactatttgtaaaccaactggtcttccacgatggccagaaagctgtagggccacaagggcaaagtctccgcggatcagccatctctaactaaggccttcagccctgctgatgtggcctttgtgcccccaaactctcccccctgattcatgagtgatcctagagctgtggcctggctcctcaagtgacagataaagaaagattccacgtattgctgacctggtgtatttcaaagactaataattgactggggcatgggtagttcaggtatggtcctgtgatctctaggaccgcaggaaggtcatcactctcccaagaggcatgactcttgctcctggactgagggcacagaaaatggccaggtcaaggatgtgtgaggagccagcatgacggaaatgctgtgaagggtgctttgtttcagggtgggcagacaggtctggaaagtggctgcacaggaggctccttgcacccctgtgaggccctccggttgtgtaatctgagaaattgctcccaaatcacttcgtatgccctggctgagaggtccacaatcaggctctggcaagtgtgcaaatgctcattatgtgggtgttacctcatctaccctgcagtgacaagcctggcttgtggcaggcaggctgcactcattgcctggcttgtggcaggcagggcttatcctggcatgagagggcagatgctgagatggggtgggataaagggtattaaccagggggcccaaggactgggaatacaaaacagtatagaaacgaagatgttggaagtcatgcctatagcttggatgccagatcattgtctctggtagaaatgaaccactctttctgattacttgatcccccccccccgccccatctttctcttgaggagaaaaggagtagaacaaatccagggtgattaactcaggatacaaaaggatcaaggctgccttgacattcagaggcctggagaggtgtaaaaatgtgtgtaaaaatgcctgctctcaggcctggtggcctgagtccccactgggaacccaggtaaggtagaaggagagaagaccacaaagttgtcatctggtttccacatgcacacccctgtcccagaattgtgcacacataatagtaatactgtaaatactagtttaaaattttaaatacaatgcaagatccactccagcagacttctcatagcttggtgagaaactgtcatttgcttagaactctatatctgacaatgaagatgtgtgttctgcctcataggaactctctctcatttgtttggagagaaaatgatgtaaaagacttgggatatttgttgcaggaggctggacctccatactattactataagaacaagtggggcagtttcaggctgttcacccaaatagacacatgaagaaaggcacagggctggaaggtggttttcaggccatgcaggagaggaaccagagggagaggttggaaagccgtgaggacccagattaactcttgtttctttccccacctctgctcctacagtgggcaatgcaaaacacctgagctccctgtgcattgtcttgactgttcttcgttcactgagattggagagccccatttctggctattaacccagctcccactcttgtctcaatacgacacacacacacacacacacacacacacacacatctcttcttgatttgattattgctgagagaatgcagtgtcctgtaaatggtcacagtcctgtcagtcctaaaggtggcaaatgcttgatctttgaatgccttttcctagtgaaaagtttctagaccctgataagcctctcagccggccgatgcagaaatccaaatcagaccaaatcaaaccaaattagaaaaagccgagtttaatgaatacaattctcctggatggccttccagccctcccctagaggagtcaggaaagggagaccagaaaaaccacctgtctgttctctgggggacagtttaaataccctgtgggagtggccttgagtatctcttggggagggtcatcatttggcaagctttctgagctgcaaccggtttggagggagatggaggagggggcttagatggaacttccaccataacatcccagaatctgtgggtatatggatgccaggggctggggtgaaacttccacttttacatgccagactctttggttcatgtctggcttcttcctgctgacaagggaggatgtcagggaagggggagtcagaagtcagtgcgatcatgctctatggtatgagtgaccagacctccatactattactataagaacaagtggggcagtttcaggctgttcacccaaatagactcatgaagaaaggcacagggctggaaggtggttttcaggccatgcaggagaggaaccagagggagaggttggaaagccgtgaggacccagattaactcttgtttctttccccacctctgctcctacagtgggcaatgcaaaacacctgagctccctgtgcatcgtcttaactgttctttggttagctggcatcctgtagacctcggacacctgttctttgaggaggcagagaaggaaggctgctaggagaaaaaatagattgttatcattggccctatgaatgtgactagccacaggagggtgataacagccagaacaaagggaatggaaaagcacatttttgctttttgtttgttctttaagacagattgttgctatgcagcactgactggtcttgaacttgaggtcttctggactcaacctcctgagcactgggattatagtgtacactaccaggccttgcttcagatttgcttttagtgttattgcttttaatatttgtcattgcagtgcacccaacagctagcctgaagaagataaagaaaattgtgagatccttctaggccttttaccagtctgtgcctacgttgtcttgaagatttgtttgagatgtgtctatgaaagagaaatgatagagaaagagaggatggaataaatagatagtccttggcttttaattttcataaatcaaaaggaaatgaaaaataaatacatggggctggagagatggctcaatggttaagagcacttccttcctttgcagaggacccaagttctattgccagcattcatatggcagctcacaccagtctataactccatttccagcggatctggcacttgctttggcctcctcaaacaccaggcatactcacagtgcacttacatacattcaggcaaaataccaatacatatataaaataaacatgaagaaagaagaaaatcagagttcatagggttaagtttttaattgattaaaataatctattcttaatgtgcctgtaggtccagagtgctatcactactgttgtaagggacagcaaaggaggaattttccaaaatgttgcagtttcccccaccccagaggttcctctgaaaacaccttccctggggagtgcacttgaactcagcagggagcagagaacccttaaacattcccctttgttagtccatgattcaaacaaaggctgtggcatttttccacagctgggcagagcagaaatggactgggcaaatggtcccaagctaagccctgaattcccggattgcagattgcgaggcctttaatttatacctctgtgtagctttgctattgacatttattagccgagagtgtggctgccaacaccagtttggagtagattgtggtaaaaacatatttcctctttacacattctaacccagtgcggaaggactgtttttattgaaaccgtatctcaactccaacctctccatactcacagacacacatgtacagagtttaagttatatttatggttggtaaatgttctaattatggggctgcgtgtgttcagagaggaaaattaaatcagtgagcatgggaggtcatgccgcccttccgctctagtttgggctccttatggttttcagctttgagaaatcaatgccgtgaaatggtgggtgacaagccaagcagacatttgtctcctggttgatttacaatgttatctgcagattgttgttggtttttttttttccccttgatgaggtgaatttttgattctttactgcctgcttcccttaacacatcacagagcaatttctaacaagcatctttcctggataatgtcccaggccttgctttccatatgaggacacaagaaatgctgaagtagagatggatgtcattgacactatgcccaatgctcagtcccaggctgctgccatgaggatgatgagtagacaccagtcctcagagtacctgcccttctctgagacagaacagaagttctgatgtcctttacagtgtctctaaagaacaaagtcttagggctgggttagggtggggtgcctcagtcagtaaagtgtgtgctttgcaagagcacagacctaagttagtccctagaacccatgaacaaatgtagtgcaagctcacagtcagcgcaaggaaggaagagacaggaggatcttgggctgtttgtctaaattcatgagttccaggacagtaaaggacactgtctcaaaaaaggtggacagcagccctgaggatgacacatgacgttgtcctctggcctttacacacaggtgccagtcatcatgtacatgcacacatatgtataagtgcattctctcaagcttgtgcacacactggagaaaaaaaagaatgagttggagctacaggcgattaaagggtctaaaggggtttgacaaggctgttattgtccctgtactgttagctcaaagagattataatattcaaaaatgggcacaatctacccaggtcttctctaccacaataaatttgctgctacaggcacaatgccttgtagtgtgggtttgagttgacagatcactgagggcaagttcgtccatactctccagttattcagctcatttatgaatgccacacagccttccatgcaaagtgtgtggtgtagacctggcaccctccacagactgatctctttgctgacagttaagagtagaggcatctgtggtgacccaatggatgtcttgagttgaattcagatattgagttgattaatattggagtcagcactgccagcagccaggacatgtgagtgctgatccccaggaagcagtcctggtggttgtgacatcagtgaccagtgacctatctatagatactaagcgaactgtctatagatactaaacaggtaccaggactctataagcttggtggaagtcccagaagatcctgcaggatgcaatcttccaaacagaaaactggtttgctattttttcatgtttcctaacccaggggctgtttttaaaacgtgggaatttcttaactgagaaatgcaacccgggaaggaaccaggagaaaacctcttatacagtgttaggacctgactaggttataaaaaacatagaaaagagtagagtgataaatcaacatacttcgtacttctacagtgcttttgatggtccaaaatacaaccagaatttttgtttctcgctttcatctcagatctccatgaagacagttgatcccataaaacatacagtgtgtataccttgaagccctcatggatataagaagcccttctctttctatcttcatgggctatgatgagatgggtaaaagtcacatggtttagtcaagggcagagtctacagaactgaagactcattgttcatcatccctgccatcttttgggccaaatgtttctcaaagtgtggccagcagcaccagcatcatccaggtttaatttcagttcaacaatttcccagagatttgtctttaaaaactaattgtatggtttgtatttcaacaaagtgaggcaaatctctgcttagcaagccctgagcctgtgtggagggtgggcccagctctgtgtattgctgtagctttgcttatgacctcctgtccaaatgtctgtgctctaaggatgccatgtacagatacaatacgacagacaggtaggcagaggagagatgtgagcccaaggacacttcctatggacagttgacacaccaagagcataaggtgacatttcttctttgggggaggggattctggttctaaatgaggtgtgagtgttcgagagggtggtaaccttgtcctgttgaattacgatgagaaaacaactcagttgcctgcagagccaaaaaacaaacctcagaactgcttaattcatccgtcaaacaaactgtattttaggaaatgcaggacagagaaaaatgcacaaaagaaaagatttatttatttgtacaaaagtggaatgacaggcgtttgagcggatccaaatagaatttaagaaggaaaaaaaaatgtgattcattgccagctattaaatcttgtttatcctttttaaactaaccagaaacacattttggaaaaatccaagttaacagttgaagcattgggagctgcttcgggcactgcctgggctccctgcctacccaaggggagggcaggagtgacatgagtcagcagatttccgaactggaagggtgagcgactgtcctgatctggtcaccaccaagcctctgccaggagtccatcggtttccatatcatggcagccagaagaagacagacgtttacactgctttgaaggacacaatacatttttctaaagacacaatcaccaagacatgtgtccctccattgggtccctccttggatccctgttgctacctcccaggacgtcatctgatttgtccagtgctgtctccagacagagacataagactgaaattcttcagcacacttgacaagtggctgaaagcttggctggaatcccagttgttggtggaagaaatcccttccatgcattgctgaggtggcccttgcatactcccctgccagggcccaggagggaacagccttttctagctgcttccatgccccatcagcatcctcttgggttaatgtattaacgtgtttctgtatagtgcccttacactgagacagaaggacttagctgtacactcaaagaattaagctgttctaaataaccataaaaggtacacatatcagggggtgaggagagccatgcaaaagtaacttttctggagcagaaaccctgatctccctcttgtttttcaagcaagtaattgcagcctgaggaatatctggggctactgatctcatttgtggctgcagatgggacccctctgagtccaagacctcctcaagaactacccaagggacaaagccagagaattcttctgtctcccctcctgtatggtgatccaggtagaaggtgctagcatttaggcatttgtgctggtctgcctttggagtctgacaagacatgccctcagttgctgccactaagagcaccacctgtgcctattcactgtgttcccttttaaaagggccctacccacctgtcccccatcccctctctctgtctctctttcctctctcctgctgctcatgtccctggagattggtcccccccccctttttttgttttttgagacagagtgtccctgtggctttagaggctgtcctgtaactagctcttgtagaccaggctggtcttgaactcacagagatccgcctgcctctgcctcgggagtgctgggattaaaggcatgcatcaccactgccctgcccctttcctccttttacaattatttttccctaataaaaaagccctctgcttgaactctgtcacatggcatctttctctctcgagccacttttattacaacagaagggacaaccatgttgtgctttgccaaccttcaagcctcaatatacttggtaagcaaaaatcttacaccagtctgctcctgtttcccccaccaacctctgcactcctcattgatagttctatcgatactatatctatgtcttgatgggaagaactgggtcttattcaatatcatttcttagcaggatgcctactgcataaagaaggcctcaaatgtggtaattaggctgaggcctcctgcaaatagatacagaagcttcggacctggttacagcatgggccatctgttccaggtgcaggtcaagacatatttcttcaattgtttatctcagtatctagtgctttaaagaaaatgctttaaatacactttaactctagagccaatatcttaaccacaacagaagaaacattggacttctcatcaggtggacttgaaatctacactgagagtaagaatccatttgagatgctgtcacagtgcctatgagataggtactatgggcacaaaatgatccaagagggaatatagagaaaaaacttagaagaaagtggtgctatttggccaggctggcagttttcagagggaccagacagaaatgtcacaggacaagtgggatatgcccactaattaatgataggtgaacaaaaggcatttcttctcacaacataacactattcagccataaaacaagtaccctacatgataaaatggaatgaatgaagcatttacttatattattctattattaaataaaacccgggagtcagatatcagggtaaaaacctgattgatcagagaagcagtagagaagtggccagtgacctctctctccatcccccatccagcctctccctactacttcctgtgtctctctatatgtatcctgggtcctccaaaacctttatggataattcctgtcaaccaatcactgattctgccctctgattcaaagtaaagtttattgtcagtctcagagtgtcagtgagaacaaatatcctacaacatctcctcctatttgtctaaatgaaaagtaacagttttaactctaacatggtaaaactatatacaataagaataattatcaggtattgtccaaataaaaagggaaggttttaactttaatgaagtaaagttataagaacaattacaaagtaagaattacattcacaatatccagtccatttgtatttggcaaactcagagaaaatataatctatcctatcttggtgagtccaaagttatgtatctaattcactttttaacaaaaattgtattaccaacctagaaatatctttttagatcttaaaacattttcttagataaacagcttaagcttttatgtatctcagcttcatatacttatcatctgttttgtgaatttcttttctgaatttggtaacaaagaaaactgtagctataactatctcatcttcaaatccatcagagacccaagaaataaacctgagtaaataagaagtgcagaacaagcaacttccaaaactatagaaatgacagagacatctggctacctggacagttacctggttcctctgcaatattggggcatccatcttcagcctacaggcacagaatatctgacagacttttctgtgaagcaggaattttgaaggactgtcttaccttgtattgtcaaagcttggcagtgaccttcttttgtgtcctgcttgtccaatttggacagcattctgtcagtacttgaggcaagggcagtttcttgcccaatggctagacttgccacaatgaaagcaaactccatatggaggttctttaattcccattatcctttttttgaaataaactggtgctgccaagagcagatgtatgtcactgccatgaaaagccttgttattaaaacatcttaaattccatattccataggtctctgaagtgaagatcatctatccacctaaaatatatctctgaccttgaaaacatattgaaaatggccacagatttgattattatagatgactacctactaacctgcatttcttaattatcctaaatagtttgtagtaataactttcaagaactaaaactttatattgaattgtttaatgaactgcattggtacaatgccttaagcaagagtagaaacacatatacagtttaacaaatatatcagtatataaaattccataccaatgtaaaatatttgagactagtacttatttcttttttcttttaaataatttatttaactttatgtacattggtgtgaaggtatcagatccactggaactagagttacagacagttgtgagctgccatgtgggtgctgggaattgaacctgggtcctctggaagagcagccagtgctcttaaccactgagccatctctctagccctacttctttttttttaatctaaaagtagattcaataatctaccctttttatcttatcattcctatacctacctttttcttttcagaatgaaattcctgaatctaatctcctttgcttagcttcctctctgatcatgaccagtaacaacttgcaatcaacctccctacaggatgacaagcatccataacccattgaatgacgcaaaaccacccactctacctcttgggaatgtgggcatcatgtttttaaaattacttgctgttgtctggtagtaatgacatctttaggagaccctgagaaaactgagataatgttcaagtcctggaagagctaagtgtatcatttggtgtccagtttctatgaaatgggggaagttcaaggcttatctgaagacctagctagagtagtctgtgaggttgggccctctcagttagctgctttgaagttgctcttaatgcagatttttaaggaaactgcagcagggccattctgagaggttggatcacctgggctacttgtcttcattagtgtctagccctttattattttttgaaaatatacaaacatttaaaggtagcatacatatctgcattaacacacgtatgaaatgcgcagtgtacacaaatcagctaaagacgattctctgttctatgtttgatcaggtaaaagaaatctgtcaactttataagtctgtttggactgcataaccaaactgtaacataaatctccatccatgtcatatgaaaggatagtgtacaataagaagtcatgaagactctgtagccaacaagatttatcatgtttttcatccagtctcagagctgttcccatagtagagggatcaggttatatgccacgtgttttgtagtttttctttgtttcttctttcatgactgcaaccaagattttcaggagttctacctcagtcaaatctgatctttattcattttgaaggaatccatagttttttgtttcctgtggaagcaaaagcaaaacctctcccccagtgcaacacattttctgacttccattctaaagttaagacattattacaatatacaggctggtttaatttattagtttttttctataatccagtgtctctctgaagcatttgtcctccactcatcagcattttaaagcttcaaagtcaacaaaacaccatacaagatccagacactctgtgtatttcccatcctcacatcactattctttttatattattttactctttctttaaagactttattattttaaaattatttcggatcatttcctatgactgtctatatccatttacttttctttcttcagcatctaagcacattttaaaacattctgttcctgtttggagggttttgttttgttttgttttgttttttggtctggacctgggtttactaagcacctgcagttttctctgaccatgtgagccaatccttaaactgctaggctatcactgtctggctccacttaacacacagtgctggcagcgggctccacccccttggttcaatgaaagcctagcctcatgcctatgggtactgcccatccagggcctcatttacccaccctagctctgggaatttgctgagttcatgccgtggcagacagcagatgttcctgtctagtccttcattccagtagggcatgatttaagtgctcagctgtatagcagggcctctttaaggagtcatgtctctgtacactgcagaagatgaactttcaaaatactgtgcaagatttcacttatatgaaatttctaaatgggaaaattcagagaaacagaagtgtgggaagaaatggcagggactgctgatgacatatcccagcattgcaggttagtgatggctgactacataaaaccacatgtcaagtgctttaatgccccagccagcggggctgcaatgtgggcccaaacctcaaaggacctggaataaagggacaagagacacaagaaacagacagcaagacaggatttctgatcaagctgcaaaattttatttttctcagagacctatatagtggttgaagtaggaagcttggcagggcagggatttgtcaggtaaccaaagcccagaaagtccctgtgtgtgagtcgttgaaggcaagcagagagtgcaggtgtagataaggcaggatgctagcagggtcagggtcagggtcagggagggagtgttgctaagtaacctgactgtggaacgtttctttctttactattagctatttctgtaagtccaggtgctatttatcaggaacttggggagggaaggattgattgggactgaaggtagccattcttccaacctaatgggctattccaaaaaatgctttttacaatcttttacaagaggtcccacacaacaatgatctctcctggcacttgaaagtggtgtataaaatcaatggtaaagaaattacctagaatagttgatctccatcactgcctaaagtgaaggaaaagtggttctgtgtgattagatagaaagagacctgaaggcagctcatgggagcaaaggccatctttccttcttgagccagctaggaaccctgtagtcccaagagctgtcttggggatggatgggctattcttcagccacatttcggccaccattttctcatcttgcatggttattcagttctgattagttctcgtggcaccataatgtgaatagatgttgaggcttggttgatctcgggcacttaactgctctatctccagcaaagtcaccattatatggtgtttttgcagaagccagacatcacaaatgctggaaagcagcaggagtccggctcaggagactgactgatacacaaggcttggcaaaatgccagctctggtgagcactcattactgctgtcaaaagacaaggtcttggggtatagagatgacactatcacagggatcctgaggctgcattactgctgtcaaaagacaaggccttggggtatagagatgacactatcacagggatcctgaggatgctgaaggttgttcttccagtctacctgtccccttcctcagcaggtgccatcacaaacacaacctttatgccatttgtgtctttttagaggcaagtgtgaaggtcacccaggggccaatcctcatccaagtggaagcctaggcactggctgtgcccactcatgaaggtgccctctctgtccacctttcacacacgatgtccggttctgcactctgggtggatgagaacccttcctcctgcattagtacccaaatccagcatttccatcctcacgtacttgacctcatttccaataagtataacagaggagtttttcatgtcaacaggtgactgaaagacagcatggggggcttctcatcataccaatccagggaaggacagaaactcacagccaccagggaaggcatgctgaaatgtgacaggactaaagtgtgactttctcaatggggccaatcatcaaagctaataaaaacagaggctctgggtttatttaatttttatcatgaataaccccccagaatagtcaaatggtttgaaaacccttcaagtgattcctgcctgaacactgatcattgtttagtccctgagggtgacacattcctgatcattaatctagacacatcccagacaaccagtagcttactgagttctcttctgcagagatgtttctggagttagaaataggctttccttacttgtcttggttggtcagtttgaggggcatgaaatgaacaatacacagatatcctggatagaccaagtgaaagagtgtttgttggcagccatagtgtgctcagttattgataaggattctgggggaccaggcttgggagaggaagaaataaagaccactatggagaatggaacttgcactgtaagatgaggccatggctggagtaatctgactaaagcaaggataggattcaaagtcttgaggagtacatctggcggagacttgtgacaagtcagctgatgaccactactgccatgagaaggaaaaggatcttgtctcttggcttctgtggtagaaggtagatgtcattccacaagaggaaaaatgtcccccacctaaagcagtcaggtgccgatgaggaagttagtacagcggtagaaactagccatcatttcttatagttgtaatatagaaaatcatcccaaacaccaaaactgaataacagcttctctctgaatgagggtagtaaagcagtgttgtatttacagtcaggtctaaatttgggaaattcttgcaaaggtggaatctgggcatgagctaaaggaatatccaacactggcactagctaacctgcttgcttggctgggcacatttgactactttggggcagataaagtgatctagaacatggagcaggtatacagcaaatacagatcatatcaaatagtagatttaggcaaccctatgtgatggatgtgtttagtcatctttttctttgaaaatatgtaataggtgattagtagttagagaaagggatgaaaaggagactatcagcattgagaaatgctatatgtaattaatgtgcatttatagtttatgtatttccctatgtaggccgttagcctgtgagagcagcgtagtatgcaatgaagagtatacaccatccttcaggggttggcagatgaggatccagccatgtgacccttggcagagtatggtaggccatgcttttaaatgggttgtttactttgctgtgacctctctgacaattaagtttcattcaggcaatgtgttggatgtacagcagggctgaaaagatccactgtgatgtatgtggacccgtttcaaagagacagaatctgagaatcatccaagaccacaggtttcacaacaacctattccccactgaacatggttgagccaatactgggtagtttggcaggcaggaggattggaaggaattctttaatgtgatggcagagctcacaagtatcccagcagctttggaagactgagtatcgcttttgtgaaagacagaggaggagctgtctgcagaggtacactatgggaattggaaagaactgaagggtaattgccaagacagtctgctcatcattgcctgagggagggaccgagtgatgctccatctctttggaaggcccctttcctcacaaactggaagatgtcagcatacaagtcccagactgcctccaacagctgccctttccctgctagttctccagagacttgattctcatcttctgctctgcagagcaatcccttgaggctccaggataagggaaacctgtatgtttccatggtgcttgtcacggttctgtggtttcagtaggcacgccattaggagtctgggtgaatgaaccagataacactctatgtgcctctttgcatgtcatcttagtgatgaagtaatgggccaatattttattgatgataaagaattatgaataataatggttgtgttctttggaaagtatctagggaaagatatgtacaaacagattttattttttgccatagccatgaaataactgctgtattggtgtataaggaatatttctggaagaataggtattgtttctctttctaaagaaagatttctaaataaagagcataatgcaatgccaaagattaagaatattgggctggaaagatgactcagcagttaagagaactggaatgctcttccagaagacctgggttcaattcccagcacccacatggcaactcaactgtcccaaactccagttccagggaatccaacacctctacagacatacatgcaggcaaaacaccaatgcacataaaataaaactaaataaatacatttaaaaaaagaatatgcttggaaaatctaggagtcagtgtgagaaaaatactatcaacaataaaggactcaaataaaggtctatgatgcttatgaaatttcacttgcaaaaatttgactttaagaaatggtacattgaattgagtttgaccagccagtgttttctttatattactgagatttgccataaagtatccatgcatttataaagaagtttattagatactctaaaatacttaaagtctatgtatatatactgaagtatgtatatatataaatatatatactaaagtctttctctctatatctatctatccatctatatatatatatatatacatagactttaagtattttatttattctatgtataatacagcttcttttaaaaaatggaaaaatgttaaagttgcatttcacagacttagacaactttctcatttaactatgggtctctagacatagcctagaatgtattttttttgtaaaaatccaacattaaaaacagtcactgcacctgagaccattctctgggagattcacaagaaaacattttaatttctgttaacatatgattctttccatgcattcacctcatgatgtaaaaaagaaaaaaaacatagtcacaacaggttctcactgattgggtgggaaaaggagagcaatcaagagtctatgggaatggtccaataagatatagagaaagttggttttaggagagaacaagaattactgttctataataatatggtaataccattatactataatacagtcttgtaatattaaaattatctaacaaaaacccttaatttttatagtggtagcctgaactatctgtgagtggaatgtcctattgcctggagcctgctttaaaatatttcagcaagaggaaaagaagtgaagcaacttgcacccactcataattctttgtttggctggctgttttttttctttttccttttttctttttttgctttgttttgtcttgtgtttttagacagggtcttactatattgctctaactggcctggaattcactatgtagactaggatggtcttgaactaactgagatctgcctgcctctgcctcctgagtgctgggattagaggtgtgcaccaccacgcctgacctggaatacacaaatcttatgagaggtcttgctatacatggggaacaaatgaagtctggaatgaatgtgtattgtggacatgagcaccaccatataagctctaaagttacacagagaaaccctgtctcagaaaaccaaaaccaaccaaacaaacaacaacaaacaaaacaaaacaaaacaaaacaaaacaaaaaaacctcaggtgcctcagactcctgggaatagcaaggccttgccttgatctgggtatggatgttgacagtatatacagagagcaacaaccagagcttcctcttccctgatgacagcagctgagactgctcccctatagagacccctgctgagattagataaccagcctcttcctcattcatgctgagttcccaggctgctgctggtgcatcctcatcagagcacacagtcaccctacatcatcttttctttcctgtctgttgtttctacgctccactcaccccagtcaggtcagtccctggccttgcagatcatagcaactatagaggaaggaaaaggcaaaagtaatgcttggcttggcctcgagatgttcttggtagtccatttgctttttgagacaggagaagctataggatgcttgaggggtgatacatgagcgtgggtgaggcacgcagggtaggcatatccagcgtgttgtccttgagtaggaagaatggatgagacctattgggtgtgccacatttatccagagtcaaccagagatggcagagaggatggggaaagggcaggcttctattggttctagtaagtcacaactgaggtcatggaccaagggtaaagaataaagagaacccactagaggcttaagcagagaggaaaaggtgagggagagaggcagagttgcctatagaaatgaaacagaatttacagagattatcagagacctacttgaggctgagaccaaccagtaagtggagaagctatggtggttgtgttcatgatacactgctctctttctctcaccactctctttggtgcagtgaccatgaccaattaactctctatgcctacctgctgtagagaacacactctgcttgaatatatagagtaatctggaggttaggaagtatttctgccttcacaaagcagcaatcagccaacagggctttggttgctattaaggactgagtatttatgtttccctgagattcatgggtgaaaccctactgacagatagttgcaaggctatgtgatagacaagagacactgaggttggatatagatggaagatatcagtgaatgacagagctgttgcagtgtgggaggaggtgtggaacacagaaggatgaatttgagaacgtgagttggagagaattgaaaatgaggttagctattaagcattatccttggaagaggggaaatgaaggaactagaaacccagagcgttgcgttatgacaggagcagagtcagggagattgaacctggtgggaatcttcaaggtctcatctgaggctcctgggtggtcaggcattccctgatgtttgagaagcaaggtgagagaatggtttggaaggtagatggagagcaaggaggtacctgtcccagttgaggaccacgtgagaggactgtaaggagacggctcctgcagcttcatattcccatctgagtcagaaagtaaagtgctatacagacaagtgatatagacaagtggtggagaacattggtggttttgttgatattggtgtgaatcctacacagaacatccaggaaaagtctgggatgcaaacagtggagggctggtcacattggggacatattggattctgtggcgatgcagctgaatgagaagggggatctgggatcttgggcttcttgttatgattaaaaaaaccaaaacaacacaacaacaacaacaactaggtagcaaatggggaagtagataatatcccaggatatataaaaatttcctttctgattatccatttctttggcatataaaagaaagggtttaattatgacattttcacatatgtatgttacagtatattttacttacactaacccttccttgtctctcctccttcttcccagcagcccccccccccacacacctggcctcctctgctcctctgttatatataatatgtatatcccactcttagtctccctgtcacctttgtgactgtcagggtccttcagtctttctctctcaggaacaaactctgttttttggttgacaagattcctctcatctaccctatctcatgaaggcagcttctaatgtgctgccattctttggaaacctcatatgaaatgtgtccctaacacatttactcttccccaggactcagtctctgacagtccatgtcttcttttcactcttcatttttcctttgtcagaggtaagaacggagattacccagtctgcaaacttttcagattgtcttatttaactcagttgtgtacatttaagcttcgcacttgtcgttatatagcgcagtggctcatttatttggaagactgaatgatggttcattgtctgacattccattgtccactcaggtttgaaggtgattttggtcacttgttctggatgttttgagcagaactgtgattgacataaacaaaagggtttttgtgagtatctaagttatgaaggagcacaactgctgattcatttggttataaaaaatatattcagaagaaataggcagcctatctccaaaagtagctgtaacattactaacagggatggtgaggtgactcagtggataaaggtgcctgctgccaagcccgagttcagtctctgagacccacccagtaggaggagagaacaaattctcacaaactgttctccgatcttcacacatgtacatgaacccccccacataccacatacaagcacatgaacacatacaagtaataaataactgtcataaaaggttttttaaataaaataaaaagcccaagacattacccatgaatgagagtccctgttgtctcatgtccttagccacaactagtgttcttctgtgtttttattacaactaggaaaaaaaaatcagtggcagacattttgtaatcctggctccaaatgatacactaagtcctagcaagttccctatttccacgctctgaaaaacacatttctgtattaacataactgcaggagaatttgagatattctgtgggcagagacttgagaaggagacatctttgtagaggacatcctgctttgaatccaaagaatcagtcatggacattgtccagccaaggaacacaaactgtgagtcatcagttgtcccgacccaagcttgcatgtgttatgggacttacttccccacagagactgggttctgtactgtttcagaacctaaacttacatctccaggataggtatggcagtcttcagacatccagaaattgaatttaccatttcccaggaaccattaccaggagcagaacatggtaaaacagccgacccctctcctagtcaatcataaagcccagctttctttcaccttgaatcatctatttgccactgtgtgggaaggtggctttgggtataccaacacactgaacagccccttagggattcagtttgattcatgttggtggcaggggcatgccccatataccctttcttgtctcctggccctgaggaaatgctctctgtcctcctcacatgcagaggattttaggaagaggggacatttcaaagtattgggtttctcgctggaagttaaaacaagacaacacagcagcagggtttgctttgctagcttgactggccccttgggtagagagctgcccagccctggcaggctctgcttccatccaaaccaaactttccccagtgacctcagggaaagatggtttacatcatgaagagaaagcccatttatttatttgcaataacttcaaattttatggagccacaagaggatataatttaagaaaacattagcaaacaattccaaataccttcaaggttttacagtttgccaggtcaaagattcatcaatggaactatttcaacattaagaatgaaaagttacatgagcattccttttgaacggggctggggaggtggaggtatttcacgatgtatatttttgttcatgacatcctggggtctaaggaaaagacaactgagtttccaggaaccattctgagcaacatatgacctaagagaagtgggtcctctaatgctgcccttgtggggcattagccccataaataatggaggcagaacatgggctggtctaaataaacctcttgagccttgctttgaacacagtgttggagcaaattacgtggtgtttttattagggtttttaagacaaaataaagaggttaccaggaaagggagtgagctaagaatggccccttgctgttgaaatatgttggttttaaagttccctttctgttagcagtcatctgttggtggtatatttaatctgctaaaacaaccaatatcatgaatctttaagaaagtatttttgaaccgtgttcaacttttttttctgaattagcgattgaatgtagggcctaacatatgctaagaaagcactctaccactgcgctatacccctgtctttgcaattttctgttagaagcatgcaggagccagtgctggaggacacaagttcctcacccaacagaccctcaccttgttcttccagggagcacaggttgggaagggcggatgtgtgcttgtgatctctcaattgtctcagtgcagatacttacactaactcttacttacactaaactacttaaaaatgtaggtgtttatcttcatactgcacctttctcagctggcttcttgaagggtgcaatcaaatctcgtaggtttgtagccccagacccaccctggtgctctttttgctggctacatttagggctatatactcacagggtactgagttaagcactgtgacagtttctctggaatatgccatgaaggcccatgggtgccttaggagatggtgggatctgtaggaagtggagcctatgggaggttaagtcattctgggtgtgattgaagaaagtagcagcaatctactgtctccaccactgaactattgcctctgttcatgttaagcactttttattatttccgttacttgacaatttcatgcatgtacactatattctctaaatataatagatattatatgttacacattataatctgattgccctctcccttcttgtctccttttatttatctcagcaccgctgatccatagcagtccctttcccaggttcatgcttttgttttgtgaaccacttaatctaaccagagccatctgcgacaccattggattggaactatccattggatgctggtgtagtcaccagtgaacacacaactaaaggtcatggttccccctctccctgaatctatcagtagcaaatagtccagcagtgagtggtagggtcccctgaacccctcctctatttatatctgactattaatgggcccattattctatcgcatacaccccggcacctgtgagtttgttcacattccttgcatcttgcctgggagatgatactccacagcccttctccgttcttgctcttaatgtttcttcttccaccactcttcctggagacaaggtctcactaaattactcaaatttgcctcttgccctgtgatctcatgtagcagggatcacaggtccgtgccaccaggctggacttctctctttttggtgtcttagccacaaggtgagtagttttctcacgtgtaactgggtgtgctgcctcctcatggaccgcaaagcgacgatgccaatcaaccatgggctgaaacccccaaagctgtgatccaaagtaattttctctttatgagctgcttagctcagttgtttgttatggtgaaggaaactgacaatcccaagcagtcaggagtgaggaacagtctagaaaagtgatgaggtcatcttaaacagcctgagtctgaggagaggagctcccccttcagaacacagctcaggatctcagcccaagagctaaccaactcttgaatagcaagtcacaaacaccttgttcttggatccacacaaaatcatttacagaggatagattctccccctccctgtttctcaaatgcagaaatggagaattaaaaaggcttaagttgcttttttccccaaggtcagagagcagattcagagtgaagctgggtctttgacctacaggtttagtttggtttttgtcactgtgacttctccccatacttttctctaagtcaagatattggctgtgtgtacttaatattttttctttcacggtaactttattcaaatataatttatctaccataaagcccaccctttgaaagacacacctcagtggtttttagtatactcacaaagccaggcagctgtcctctctgtgtaattccaaaaccatgtcaggacatcccagaggaatcccatgtgattgtgttttcccccctccccctaagagctctctccttttggtctctctctgttcagatattttatgtaggtgggatcatacaccctgtggcctttttgttggtttatttcacagggcatgatgtttcctaggttcatctgtgccatgtgtcagagactttatcctgtatagacatatcctgttttgttcagccattcactggctgatgggtgtgttgtgtccattcattggctgtcatgcataatgctgctataagcatttcaatacaagtggtttttaggaaaatgtgtccttaagtcccaggcgtagatctaggaataggaattgtaaagttctatagtaattctgtatttaagcattttgagagacaaaaaagtgttttccagtgtgacattcctattttatgttctctccatcaatgcacaagaattgcaagttctctacatcttcatcaacatttattattttctatttctgatcatagctgtcttaggggcagtgaactgaggtctcactgcgatttcattggcatttccctgagggctaacaatttccatatgcttaatgatcactttcaaatctttataataaatattttcctattgaggcattaacatgttttagtcctatgctctttttaaaagctttatttatttcatatgtatgggtgtttatcttgcatgtatatccgcacatcacatacatgcagtgtcctcagaggccagaagagaggttcagatcctttggaactggagtaaaaggcaggtgttagccaccttgtgggagcctgggtcctctggaagagcagcaagtgttcctaaccactgagccatctctccagcacctgctgtgtccatttttaatcagattagtttaccttattgaaacgaattgtctaatatattctctatatgttctagattcatttccttagaaaaaaacctccagatagttcaccccattctttgtgttcttcttgtttttctcagtggtactttttgaaataggaacacttagattttgataatattcaacacatactcaaaaaatgccttgtgccatttaaagttaagaaatcattacttaattcactacttaattcaagatcataacagttgctcccattttttaaagctttattgttttcattcttattcataagactatttgaattatttagtatatggaatgaagcagaaatacataaatattcacttttgctgacacacttgcctgtcattggaccaaaaataacacaatataggttacagacataagcgtaaaatctgagactacataactactgaagaaaaaccaagggagaaaatcttgttaacattggtctaaacatggatttatgaaaaagaaacctcaaaaacatgaaaaataaaagcaaccaaggcaaatgggattccgttaagttgaaacatttctatactgcagaaaaaataatcaatggagaaaacaggcaccttcagaatgagagaatatatcagaaactattacctcataaaaagttaacattcaatatacaaggaactcaatttaataacaaaacccaattttaaattaggccaaagacctgaaatggcattcttcaaaaaagagattaacataactaagcattagggaaatgtaaatcaaaaccacaaggagattcaatctcaatccagtcaggataacttctatccagaaaaaaaaaataagaccaaaaccaaaccaaaacaacaatgacaacaaaaacaaacaaacaaaccaaaataaaaaaacccaaccaaccaaaaacaaaaacaacaaaaaacaaccccaaaagataacaagtgccagtgagatacgcagaaaagaaacctctatgcactgttgatgggagcgtaaattagaacactcataggaataggaaacagtatggagtggctggagagatggctcagcagttaagagcactggctgcacttgcagaggacctgagtttggttcacagcacccatactgtgcagctcataactgctggtaactccatctccagagaatctgatgtcctcttctggcctccacaggtacctgaactcatgtgcacaacacacacacaagacacacacacacacacacacacacacacacacacattcagtcagaggttactatcaggcatcttcctctatcattctccaattttattctttgaggcagggtctctcactgaacctaagcttatcatttcatcgaggctgattggctagtgaattccaaggatttcttcctgtctccacttacctagtgctgggattccagatgcacgctgctgctgcatccagatttttatgtgagtgctttggacacaaactcaattcagcaaatatgtaactgacagagccatctccccaactcccttcttagaactgttctatgtaccaaatcaggttgtctatcaatataaatatcttttttatttttatttccaatctatgtgcagtttatttctctttcttgcctaattgctatggctattgcctccagtactctgttgaatagaagccttagaaatagatatccttgtctttgtctttatctttaaggaggcatttatttttttaagcttttaaaagaagcttttatttattttatagtatgtgcattacaggaaacaaaacacaagaagccaagaagagtctcccagtcacacacagctcagcttgctgtgtcctgctagatgctgcaatgtacatacatttagggaattgagattatacagtatgtatcaagctttcccccacattgtgaatattcaccaactaaaaaccccaatgctacatgagtattttgttaaccaagaatacacctcgccatctcaatctgtcagacaagactgtaatcctgtcttccttggcaacaaaatctcatagaagacaaaaatggcagcaggcttctagataagaagtactggcgaagttacaattagaattctgcatttggaggcatttattttgaccattagagggcatcatgtagatctttgacagatactttatcccgttgaaggaattcttttttgttcctaattggccttgcatctttcgccatgaaagagcactgaattttgttacatattgctgcagatactgagatggatgtgtagtatttgtcttttattgtcttttacattacactgatctattctttatgttgatgcaacctagaattagtcctacttatgttaatagtccttttttatatgttgctaaattgagttcagtgattttctaaaaatattttttcatcagtatgcagagagatattagtctttaatttttttgtgttttaattttgtatcagtatagtactgttcttatgtgagttggtgagagttattgtttctgttttatagacgaggcttttaaaaataatattcttatttattcttggaaaatttagtgtgtgtatgtaatgtattttgatcatacccatcctcacttcctccattcagtttctctggggatcccacagcccatctccttctccacttcacgccctcttatagcatttataaatatccttctttgtttttagtaataacatttatcctagatatgtttactttattattatagctagtctactcatcttttgatgatatttgcacaacatctttcccctcaaacttgcttttactctgtctcttaaagtctaatatgctcttctgtcaataatagggagattagagttagcatctgggttttgtctgtttacttgttgtaccaatctctgtcatctggttgatgtttttaaattttgcttctaatgtcactgttgataattgggatatatgcttgtcattagctagttttagtttgtgttttcctattttactccattatttctcaattactgccttcttttgcatcaggcagatattttctattttattattttgattccttggttgtatttttggcaggtgtgtgtgtgtgtgtgtgtgtgtgtgtgtgtgtgtgtgtgcttgcctttggataccaaaggtgcaccttgaatgtggttcctcaagagttgcccaccttggctttgtttgtttgtttgtttttgagacacattctctccctgggacccaagtcttgcagattaagctagattggctggctagtgagtctcctgtcttatgggtcctgtcttcaccttcccagggctgggagtacaaacacatgccaccatgcccagcttttgacatggctgctgctggagatagaacctaggtccttgtgattatgcagcaagcattttaccaactgagctatctcttcaacaccttaaattgtagctttcaattttgtttttttttttgttttgtttttttgttttttttttagtttttccctgggattacaaataacaccttaatttagaacagcctggtttgagataatgccaacttcatttcaacaatatagaatgctttttctccagtacagatgttttatccttctctcttgatctactattgtcatcatattgcatctttatgcattttaagcccacaaatgattctatagttgttgcattgtgaacttgtcttttaaatcacgtaggagaaaaggttataaatggagctattatacactgtcttccgcatgtgccctgtgtagttatttttattggtgggttttatttctttgtatgatttgagttattacctagtgtctataatttccccccaaagggcaagtctgatagctgtgagttattttcactcctgttgatttaagacgatcttaatttctctagtttttcaatgtttctttcacagaaatagtatttttggctgatagtcttttaacacttggagtatatcatcctactgctgtctgtcatttatggtttctgacaggaagccggctgttaggaaattatcccaagaattgacgagggaatgaaaaagttctgcacagagaaggaaagaaccagtagagtaagggaaccagctacagaatggaagaaaaacctttgccagccacacatctgataagggatcagtgccttgaatatatgaagaactaaaaaagttaagcacctctccacaaataattcaaacgataagtgggctagtgaattgaacggacaattctcaaaagatgaaatacaaatgaaccataaatactgtttaaaagttcaacagccttagccactagggaaatgcaaaattgtaaatgtgtttagatttcatctcacacaaatgagaagctggaaagatggcttaaaggttaagagcgttggttgctcttcctgaggacccaggtaaaatccctagcacctaaatggcaccaaggcctgtagttttgggggaatctaatgcctcttctggcttccacaggcaacgcacaaatgtgggatttaaggggaaggggcctaaaatgagggaacagaagagatttagagaaggcaataaggagaaaaacataaaatatcacacattttcctctcatttactgattttttttgttatggtaaagcatcaagaacaatatgtagaacataaagggttaatttagtttaccattccggggggagagtccctaatggcaggaaggcatgacagcaggtgaccagaacaagaaagaagcttatatataagatttttcaactgcaatcaggaagcagaggatgctaactggaagaggagcacagccatggctcccaaagacttacccctgtgacatgcttctctcaacaaggctgcatctcccacaggttccacaacctcctcaagcagcaccactaactggggaccaagtgttcacctacctgagcctatggcagacattgctcatttaaactgccatatatgcacagcacaggcttaaatacatacacagagagagatggtagaaaaaactaaaggcagactacttgggggaagaggaccagcaagagtggaggaaggaaggggcgggggtaagggaggagcaaatatgagcatggtacaatgtaagctatgaaagtcaccattttgcatgctaacttaattaatcaaaatgtcaaccatgtattcatgaacttctttcttttgttgttgtcaagagtctgtgctttgtgctttgtgctttggcaatttgaaaatatcctttccaggggtagaactctgaatttatcctactaggagtttgctgaacttattggatgtgtagtttaatgtttcaatccaagaggaagcatttcaaccatccttggttcaatttttctttctttactctctctcctatctctctaaggatccaactgtgcatgcatgggtttgctttgtggtagcatacagatttctaatgcttgtgtgtttgtattggtccttggactgggcagcctcatttggtgagtcttttggatttcctgatcttttctcctgttacctaaagtctaatgttgggtcctgtgacagttaattttaagtgtcagcttgaccaggttaaggaattcctcagctagccgagaaagcattatgtttatgtctgtgagggtgaacctagaaacaactggaatttgaatcagtggactggataaggagaacctgactttacccattgtgggtagaggcacagcaaagttagttgaggacctgaatagagcaagaaagtgaaagaaaggcatgaatttctatatctggatgagatctagagatctagatctgaggtagatggtatacagacagagtcctagttagcactaattgtcaactttatacagcctagagtcatttgagaaggaagtcttgcttgaggaattgcctgaatcggattggcctatgggtttgtttgtaggggattgtcttgattgttaattgatgcaggaggggccagcccacggtggatggtaccatcctaagtaggtagaactcactgtatgagaatctagctgtcttagttagagtttctattcctgtgataaaaataccatgaccaaaagcaacttggagagaaaggggtttatttcattttacagcttatagtccatcacctaagagaatcagggcaggaactcaagacaggagcctggagccaggaaccaatgtagaggccacaaagaaatgttgctcactggcttgctcttcctggcttactcattcttctttcttatagaaccaaggaccaccagctcaagaatggcactgcccacagtgagctaggccctcccccatcaaccatacattttctaaaaagtgtcccacaggtgtgccccctggccagcctgataggagactgttcttacttgaggctttcttttcccaaatgactctagcttgtgtcaagtcgacataaaactagccagagcattgactatgcaggagtcttggtgggcctatttcaagttcttgccctgaatttcctcagtgatggactgcaacctgtacaaaaagcagaaagaaaccttttcctttcctaagctgtttatggtcatagtatttgtcacaaccactgaaagcctaaatagacagaataaaagacagacagacagacagacagacagacagattgattgattctgggctttggagaacgttgactaaaataggtcctcagttattttttttccaactttttaaatttgaattagaaacaggattgttttacatgacaatcccagttcccttctcccatccgtcctcacctaccacccccccccccaaatcttatctgtcacatatcttttctgctctccctggatggtgaggccttctatagggtgtcatcctcagtttttttttttatttcaattattgttcctttctgatctcaagtctctatttggcactgtgggtactttctgttttcttattgatgtcatctatttagtgaagtgtcattctcaaactttaattcattagcttttagtgattaatatttgaacatactatagctgacaatgtctccatcatccaagtccaacatctgggcttccttacagaaagttgttactgactgtctcaccacctgtctaggccacagtttccaagtttctttgtgtggctcctaagttttcctggccacgatgaacataaactgttatatcctagaatctgatccttccttctcctagtgactatgatgctacaaatgccgttgcttctgttacccccctttttccccccaagatagggcttctctgtagctttggaggctgtcctggaactcactctgtagaccaggctggtcttgaactcatagagatcctcctgcctctgcctcccaagtgctgggattaaaggtgtgtgccaccactgcctggattttgttagttctttagtaacttcttgatttggataaaatacatattttttgtcatatgggactatcgaagtatccacttgtgagcttagaaatttaatgatggcaaaaagacttcattggatgggtcaacaactaaatttcccatcttttctgatgggacccatggcatgttgcagcacgttttttgtgtacatgataactctaccttagcatctatgtcctgctatcccagagcctgaaggtcaaggagaagcaagaacttctggctttcttgtgctctcctcccctctcccctggcttgaacaaaactctagatatttgtaaggtcccttgattgcatgtgacccactagacactcttggcatttctgtttttaagtttgtttggtttggtgggaagagacaagctctcacgtagcccaagctgatgttaaacacctgattatcttatctctacctcccaagtggcttttaaagattcttagtaaacctcttagctgagactggacatgatgccttgggcatctgtgacattaaataattgtagctgagtgttttctgtggctgcctaggggggagatgtttgcacacagctctgatctggaccaaataaagacagatcttggaatggaactttgcagcaggctgccaaatcattgagtagtgacactctattggggatacaatttttaagggagctccaagcctctctgctttcttcagtgactgttggatttctagtttcagtttccatatttcctagacttttgacctttccatggacatgggtggagggagtggagttgggttcagtgaaaacttgaggctgaacctgatctggactgtccagggttctgaggtcaaattctgatccaagtcaaaagacgaagtaaataagttgcacatccttactggcgtggcttcctttctaaataacaaggctgtcagtatttcaaaagaaactgtaactgacaatgccaagtgctggcaaggataggagtgactcaagctctcatccactgatggtgggaatgcaaaatagcaagccgctctggaaaacagttccccattttggataaagccaagcacacgctttctgttggataccacagtctcattctgtgatatttactcgagggaaaagaaagcatgtccttgctaacatctacatgtgaatgtttatagctgctttgtgcatatcacaacaccaagggagaatatgttcttcaactggcaaaaaaataaacaaatgaggtacaagcacacagcagaattacatttggaaaaaaaaacaaatttcttatattccaatgacatggatgaatctcagtggtttaccccaaaggaaaccagactcaaacaactgaagatggggtgattttatttatagcatggtctacaaaaggcagaggtcgtcagagagcctggagatcagaaaagaaaagaaaaggtatgaaatattttgaggtttgttttgttttgttttgttttgttttttgagacagggtttctctgtattgctttggaggcttcctggaactagctcttgtagaccaggctggtctggaactcacagagatctgcctgcctctgcctctgcctccgccttccaagtgctgggactaaaggcatgtgccaccactgcccggctggtatgaaatattttgatagaagggctgatgtagcagttgaatgtcttgattcaacaggggtggttcagggattgtgccttttctacattggaaatatgtatagatgtacaataaagggcaaacttattatatatgttatacattaatttaaaaagttagaaataggaaaagaaagaggcaggggaggaggagaggttgactctgttttattagtctcagtaaagaaaacctattactattattattattattattattattattattattagttaaatgtattcaattattttacctcctgactgcaatttccctcccctcgttactcctatccctgaccaagccacttctcctctgtttctgttcagaaaggggcaggcttcctgtggtgtcaacaaatcatggcccatcaagttgtggtagaactaagctccttcccttgaattaaggttgggcaaggcaacccagtatgaggaataggttcctggaagccagccaaagccttagggacaggcccttcttccatcactaggagtcccacaagtagatcaagctattacacatatgtagagggtctaggttggtcccatgtcagctccctagctgttggtccagagttggagctcctatgagcctgttagttttttctgagggttcccttgtgatgaccttgaagcctcctgggtagtacaatccctcctccatctcttcaacaggattccatgagctcggccagtgcttggctgtggatctctgcatctgtttccatcttcactggatgaagtctctctgatgacaattgtgaaggttaccaattgattacaagagaagtccagttcaggctacctatccactattgctgggagtcttaactgaggtcatccttgtagattcgtgggatttccccttggaccaggtttctacctgaccccaaaatgcctcccaacaagatgtctctttcattgtctcccctccacccccctaacccaatcccttatgttcccattcctgctggcccctgtctatcgaggagatctatttccccttcccaggggaatccatgtgtgtccatcctcccttgggctctccttgttacccagcctctctgtctatggattatagcatgattatcctttattttacagctaatatctgcttacgagagagtacagaccatgtttgtctttctaggtctgtgttacctcactcaggatgatttttttttccatcctagttccatccatttgccttcaaatttcctaatgtcattttttttaacagctgagtaatacgccattgtgtaaatgtaccacagtttctttatccattctttggttgaggggcatctaggctgtttccaggttcttgctattatgaataatgccttttgaacaccgaggtctgggttgtatcttgggcagcttcctgcaggaagcttcttaggtctgaacttctctccaactaactgaaaatttagatacccagatagctcagttgagagggatattagtgccattccagtttaatcaacagctttgtgctggggtcactctctcccaagagcactttctgaccattgccaacctctggggcatgttggggttcctacagccattgtaagatgcaggtaccttgattctgagatgatcagatcctagccattgctggagctacagctgagggtgctaccagtagctgaccactcccttgcaagctgagctttgtttatcctatagttggagatcatggtataaagaaaatcaggcaccagcaccataggtggaacttgtaacacatagcttagaaaccattgttctccgttctggtgcagagtaaatacttgcttggttacacttttgaaatctatatgaaaagactatcagctaaatagaggtgttgcacaaggaaagacgttcagatatcaaacattcaagagggagaaggccctgtgatgtgagtagatcctgctctgattacatactgtctacagagggaaggcttcactgggtgtgggtttggattcacactgctttctactgtgaaggtctggaaaggtgctggggccagggtggctgccatcccagtggagacacacagtgaccttaactgtcaagcatcttcggcttgtagtcttgaactttcttcttaggcaggatgtggcttcctcactccatgctaatggatcaagatgatgcaaagcaatccttgagagaagctgaagggagagggaagttgtgggtacatccctgagccatctaaggctgtttccttcccttcctttcttggcttgttctgttaggaaggagggccactaaagaaggacgtggtatcctctggctcagagaagctgcagtttggacttagcgagcacagtggagttctcaaagctccctctgggtgggtgagactgcagtctgtagtgagagcatccgaaggaggaacagctgccggtgtttgcaggtgcacactcggcactgtggtgggagactcctagacagcatgtgtgaatttggagttaggactacacagttgaaacctccaatgggagattaaagtcactgcttaaagtagatgtttcagggctgtgtagacggctcagctgttatgagcatgtactgttcttccagagaactcatatttggttcccagaatccagtctggaatctcacaccacctgtaactccagttcaagatgcacctagtctccatgagcacttgtacattctctctctctctctctctctctctctctctctctctctctctctctctctcacatattctcatgcacacaaaatttaaaattgctaagaaatagatcttctaagatggttgttgcctgccaacagtggcaatgggatgggggaaagtcagcaatccagtgtgctgggggtgtgctctagagtggagaattttcctcttggtattggatggagtgaatcagagtgtatcagagtgtttacaaaaacactgtagaatcttcaaacatccttaaataatgacacagactctcatttctggcagttctcagggtctttataacttttcctgttttttttttttttttttttttttttttttgtggctcatcccactcaaccaagtaagttatattaaaatagaccaacactgaggaacagcaagcagcaagctgaggctgctgctaagggttgtagatggcatcttgggctcctaggaaacctcttggctgtgactccaaagctccatgcatctttctgaacttattctgtcaccctctacagtcttggtccatgtcccagtgtgacccacttgtcccctatgtcccatatccagtccatttatcctgctgttggattgcagtatagcctttaggctggaagggatgtattaacaatgaatctgttgcactttgattccttattgtcctgtagctatctcctctgaactgaagcattctccttggagggagaaggagggttcctaagactttgggagctaactaaggttacaaggcccaggaagctcatgaaagttacaaggtcctttccaaattgcataaactgtaagcaatcagtggagacgcctgtagcttgagcagggggctccacgcatgcagctctcattgtttcttgccagtgcagggataggccctctggtgatgcagctgcctttgagtcagccatgccccaggaagtagtccctcgcccatgcttctgtaagtaaccgctgtaaccttgcctaactaaggatttgcgtgcaagcctttctttggtctgtcggtggtgccctgtctggggtgcgtagatgtgtgttcatatctcctcaggaagaaatagagcaacccttatttttaactaataaggggcatgggtgtgtggagttttataggtgtgtgtgtgtgtgtgtgtgtgtgtgtgtgtgtgtgtgtgcgcgcgtgcgcgcctggcttatgtgtgggtgctggtcctcctgtttgcacagcaagccctttactaactgagccactttccagccgtgttaatagtttgtaatgatgaaacactgataactgacacttaactttgctataggatgaattacctttcctagaactttacatattgaagtcctaacccccacggagtctgtatttggaggaaggaccattaagaagaaattaaggccaaatgaagctgaaaaggtgcaatcctcacctaatcacattgccattcacataaagggagaaacagagaccaagatatgcacacagagatgggccaagtgaggtcctagcagcaagctggccatctgcaagccaggggaaactgcaggagaagctacatcaccagtttccagactctagaatgatgagaatgaatttctattagttaagccatcctgcctgtcgcattttgctgtggtatttatagtagtctattactttactgtgaactgaaaccagttaagtgctttatatccattattttaagtaaggtcttttaagtcttttaagcaaggtcatgtgataatccccagcgcatagatagggaaacactagtgaaataaatcagtactgagacttgaactccagtctgctaactgaaaagctgtgcacatatgttgaacacaaggctacctcaaaagaaagcatatggtctagactgctctcagagatgggcctgtttgtgttggactttaatgcttgtgtgtgtgtgtgtgtgtgtgtgtgtgagagagagagagagagggagagagagagagagagagagagagagagagaagagagtgtgtgcatgtgtgcggaggccagaagtcaatggcctatcagcattgtccatgggaaaccctgactctgacagtgacagagggcctgtcatagctcccctaaagctaagtccatgtcttaattgaaggaatctgtgactataccatatatggtacaatagtgaacaccaccttacatggcaaaaggcatgatgatttaaggaagaggggcttgtcctggtttatacagggggaaatctaaatgctttcacaggtgccaaaagaaagagacaaagattgatggcacagatggaggaggaggaggaggaggaggaggaggaggagggggagggggggaaaccagagaggggagaaagcaaggtgaagactgaacacagagagaagcagctacaagtcatgggattccaacagcttgggtttggacattgggctcctagacctatgaggaagtcaattgttgttgaagctacccagtttgtggtggctccttcagagactcagacaggagccttagacacctccgtgactcctctgaaatgagcatgtgaagttaaggtgatggctgtagcccactggtgacgatgctacaccaccctcacctccctatgtagtcaccaacatgtatgaaagtgttgagatggctggacagatggctctggctgtggtggactaactgctgggcaagcatgaaggctggagtttggatacttggcagccaccaaaaagtactttagggcaaaggggtctataactcccacccctgggggaaggggaatagagacaggggaatccttaatgttcattggccagacagtctagccaatccatgagctctgtgttcagtgggagatcctgtcttaacaataaggtgcatgacacctggtgctgaaggttttgaagtatgaacatcctcccaaagcaactggcaggcactacctggagggtgagtgaaggagccctccaggtgagtctgttggtaccagcccccagttctgtgttcagatctgacagtttgcatagtctgtgatacccattgcccctcatccccccaccacaagcctcaaagaaccacgtgaagttttgagcagtgagaaaactatgaatttccagagtagaaatggagggtcctggaggccacccaagacaggtagggaacaggagaggagcacagtggtggctgcagtggaggccagccacctgggaggtctaggagcctcaaaaacagcacggtggaggggccaacgccaggcacctgtgaaaatagcaaatacttgagccagagaggcaacacatcctgccctgctcccagaggctccccaccgaggcaaggatcaccaggccggggtgatgtgtctcccacggtgtctgcgtcccctgggccccacaggaatttgacatgggcaaccacttcaggctgcagaaaagatactggagaagggaaaaaggaaagagagggaggaggaggaaggagagggaggggagggagagaaggagagagagagagagagagagagagagagagagagnnnnnnnnnnnnnnnnnnnnnnnnnnnnnnnnnnnnnnnnnnnnnnnnnnnnnnnnnnnnnnnnnnnnnnnnnnnnnnnnnnnnnnnnnnnnnnnnnnnnnnnnnnnnnnnnnnnnnnnnnnnnnnnnnnnnngtgtggaagagagagagagagacagagggagagagagagagagggggagagagagatagagagagagagagagagagagagtttttatggctaagacagcttgctctgccctcctcccctcctgcttgtccaggctgggggaccctgatgagccagaaagttctctgggaagcagggggctggggagggggtgggaggctctcccccaccacacagctgacagacacttgagaactttccttcccaagcctgtatcctgctggttcggggcaaagtgtgcaggtttcccaccaggatcagtgaggaaacggcctggtttggactcaaacatgctgatttgttttctcaacagggccccagctccattcagggagccgggagatgcccgcttttccagggtgcctcccgctccctttccgagaacacatcacccagtgtctgtaaggcttctgcttcttgtttgacatcccttatttacaaagcaaacagaacgttccttttaacacacatcatgctaagtttattaatgcagaaaacaatcccaggaggccgacccgggggccccgtgaaacctgccagcacaaactcttcaaaagctcaggccggcagatcctccaggacaatatttcacacaatggagtaaaaataatatttttctttggacctttccagccgcttttgtggcgagcagacagaaattattttcttactctgctcccagaccagaactctagatgaagcagcgtttatttgtttaacacaatgatttcatcctaaatgtctcgacagcaaatagttggtggcttaataaagggcctttgaaaggaggctggggctggggaaatgtggggctgtggctctcaggagcccaatgggccagtctgctgagattgggttccccctcagcctgttggggagccctgtggggaagcatgctactgccccctggatcacaacacttacactgctggcacttggagaccgcaggagactgagaatttggtcccaaatggcaggccttctccaagatgggccctgccaaatacagatggacataacccacaggcagatactcaaccctgtgaggagaaaagagaacttttgtgttcatttctgctttcccctgattaaaaatgatgtcttctgtcaaccaaaagttggctgctattctgatgccagctgggacttctgcagccaggcctcttgattaggagaagagagagggaacatggccagcttaggcagaagaatcctccaatcaacagacacttcactcagccagctaggaccaaagctccctggacactttcaaagtgcaatcagacgtgtcaacaagaactccaaagggctgtttgcatttcactcttttccttgggaagaactggaaagggagtgaaatgaaacagagcacacagaagaaaaaccaggaggaagtgaattgtagccaactctccaggtgccctggccatcagagcctagccaccactacacagaaaggagggtgggagtatgtctcaggacacccagttgtaggagacagggcctgattggaaccaggcatctgtgtccatggtaggagaaagaggccagtcttgccctacagctgaatggcaagtctcattttggcaaccaggacttagatggaacatctcccctacttcatgactgaatctgattcagttcctggagatttggtgcctgaaacaacttatttagatctgagtttgttgctagtctcaacaggggagaaggactatgttctcacgtatagctacttctaacattaaatcaacactggtttactgaaggctgtattgatgaatgtgcacaagtataaacaagataattacttaggccaactcatgataacatacttctgttgattaattggtctatcttctcttagtctcttagtttccttttttctctatgcttttgctcttgttattttacaagatgaaaatatccaaagttgtttatttttgaagtttttttgggtcttgagcttcttgcatatcatgctacaaaacacagcatttaaatgactgtttgatgctatttcatgctgtagcttatggtgcagggtattctccagtccccatgctggttgcagtatacaggttggtcttgaggactgccaggctgtgtgggaaatatgcagaaggccctagcattcccaaagcaatttaaatctctttccctcagtcttacagaggcttcagattgcctccaaacccacagcttgacctgccctcagcccccctttcatcttttctactgtttatttttccttcttccttcccagacctgaaataagcagatattaactcttcagacctgcttggtattttacactcccaaagaggtttcacagaagtgacattatttgattgtcatcaaaaccctgcagcctgggcatggaggaatgacctccatttcacaagcaggaagtgtttttgagcctggcattttgatagtcactggaggagggacccaaagaaactggttcttgtctttggtagttcttagtccaggaattcagtagatgatggttagtcttatttttggcttatatgacttagttctaccacacgggcaaaaagtggctcagggaagtaaccttgcacacccttactttctggactccatcccttctaccacttggcatgactgatgaccattagccacaagtaggcccatccttgggaaggaagtcaggctagggagatggtggggatttcaaacccctggcaccctctagcacaagccccagtacaagttcctaacccttgaatcagcttctaaggggagtgagttggtccatctgttgaaactttcttaatgttggtaataaaatagatcatttgtcatttaatgaacacgtatttgtttgaggacaatttctgtattcttcaagaaggaaaaggaagtaccagaaaactttcccatgggccactttttattttggatgctttgcaaacattcttctgtttaagtcacaatcacaaggtccttgcatatgctaggaaagcactccaccaatcagccgcacccctggcctcctgctctgttaatcacttaggtactaatcagttctcaacctgtgggtcaaaacctcttgggggccaccaaataaccccttcacaggggccacctaatcagaaaacacagatatttacattacagttcataacagtagcaatattacagttatgaagtagctacgaaaatattttatggttggggccaccacaacatgcggaactgtattaaagggttgcaacatcttgaaagttgagaaccactggcttaggatctacttatcacaatgagcctatgaactgtttgcttcatcagaggcaatggtttggatgtcccatttgtagacgagtaatggatgctctgagggattaggcaacctgtactctgtcacatagtatgaaatggaattgaaatagaaatccagtctactggctctagcactgtccattttccaccactgtacccttggtaaactgtatacatcatccaggccatggggaactattcagcctccatgggtatgacagttcagaaacttcaattcatagtgcactgactagcctcccattcatctttgtctctttacagttcctagcactttgccatgaaacagcccttgctggttcttcctgattgtttgggcttcctctgtcttacatcatcacttgcatgggactctagagcatgagactgttaatctcagggtcgtgggttcaagcccctgttgggcaccaaaatgttgttggttgttttattctttactctttgctctttttgtggggcccgccacccagctcccaagtaaaacacagagtcttattattacttataaatgcccagccttagcttggcttgtttctttccagtttttttttaaaacttaaattatcccatctaccttttgtctctgggcttttatctttctctatttctgtatatcttttcatgccttcttattctgtgtctagctgtgtggctgtgtgactggcccctttttttctcattccttcatatcacttttccttctcttaattctctcagcctgccagccccacctatcctttctcctgcctcaatattggctattcagctctttattaggccatcaggtgttttaaatggtcaaagaatcaaagcttcacagagttgaacaaatgcaatataaaaaaaggcaacacatctttgcatcactaaaacaaatgttccacagcataaacaagtgtaacaggccttgaaataatattccacaacagggatctgattcctaaagaggagagtatgctactttaaggactgctggactattttctgcgaaggcagactgtgcttgcatctcagttccatttctgactagctattgacctagtactgctgcctaatcactcagaatataatctgttcctgtgtaaactgggcattcactcatccagttattttcagaagaagctaatacaaaaactaaggtcaaattttgtcactgtcccttgtggacatgttatggtccttactagagatccagcagcaggagttgacagcttttcaaggagctgcctcttgaagccttggaacacccatgatctcacctgatgccctgatcctgcaggagctaattgttagatccagaaggaaaaattctttatagtagaactgcctgcttagcacacatgtctttgaattgattacatagttcatcatacagatgcctgtgtaggaatatagacccttggagcttgtatttcatgtatttccaagatgtacaatgttgtaagatgtttaaaacagaagtagatgaaatgaaatcagagttgactaaactgattttgctctttctgatagtgaggtcgtgttggtaacacttgtattgacataagaacacattacttagcaaaggtttagaagcagtctctgggaatatccagttgatgccaaaaaaaccacagcagtgctgtgtgagcaagaaaattgattcgtgtcaagaagagttgcttttggctctggaggatatttgaagtcacttcttcattctccccctccatcctgtcccaagatacacttgttcaagtatttggtatgcctggatctgactaataccagcaaaatattttctggactgttctagtatgatttctttgtcttcatcacctaagtgtgagtcttactgaagcagactttgagcagcctgcctgcttggagccttccttcctttctttcttccttccttcccttccccctccatctctttcttcctcccatttttcattccttctttccccttccttccctcaccttcccccttcctttcttttttatttttagatggatagaggttttccaaacagtggttttattttgaaacttgcagaaagtaataccatcctttctgaaatacttgttttggatctcaaaatgtaacctgatgctcctgatcagcattttctcttcatggaactctgcctttatctcgtagcctccttaagttacccagtcagcctgaatcaaatctaacatagttccatggagtttttattgtagttcaccttcgttgacttgcaatgtgcattcctaacatgtatgtaaatgtaaatgatatcattggttaggatactgaacagagtattctgatttaacacctggcctaaaataccacactgttttactcagagcaaccaggcaacagagttactttaagacctcaagttcattatcatcagatcattttaagctctgtgacaacttttgacaccttccatatctatcacagatcaaaagaggatcctcaaacagaacaataacactgagtgaaagttacataaagtctttctctattagaagagtttattttggccctccaaatatcatcttttatggattcccatagatccctgtgtactagttgtttttctattactgtgataaagttcatgatcaaggcaacgtttaaaagaaagcattttattgggcttatagttccagagagtcagtccatgatgacagagtgaaggtgtggtgacagcaacatctaggaaggagagtttacctctcagacagcgagcagtggcagagagaacactgggaatgacacaagtcttttgaaacttcaaagcccatccccagtgacacacctcctccaaggctgcacctcctaatcttccccaaacagttctaccaactggagaccaagaactcaaatagctgagcttatagggccattctccttcaaaccaccactcagtgattcttcatagttggagtttcaagcctcatagtgattttcttggttatgttagttcttaaaaattcagaaaaaatggctttcgatgttttacataaaaatggtcataagtaggctccagaagatggagaataaaaagactagccagctcagaatttgagggcttcttctgtatattgtttgatcacacacacacacacacacacacacacacacacacacacacacacacaagacttagagttgaaaatgtccataagtgtagtgaggaaatgccccaacaaaagcctgctttctcaagccaccagactagtaaagctgtaacttaggaaaacagaaaaataaacaaataaatactgttttcaatcaaacaccatagaagaaatttcagctttatttcatcgtggcaacaaaggccaacactcccaggcacacaggattctagtgaagcactccagtccctcatcttaatggagccagaggaggtcaaatataaagccaggactttgatcccttgtagttataaacaatccctgctctccaccatgatgtcattgaggacaatatggggaaacaggacttccacctcaccagcaatagtaagtcacccctttcttccccactcagggtatcaaggaggctaagtgagagtcaggactttcacaactgcccaatgataacaaatctactccaattaaatctcagcaacatcccttggagacccagaactcttatatccacccagaaataatgaggaccaccccactttagatatcagtgttgggcaagtgaggtactgggcttctacctccacctgttagttacaagctgacctttgttgctacagggcctatgggagaaagactcttaactttcaagtccttagcaaaggaaagatgaaaaaaaaaaggatgaagaggagctaagaaataacagctgaaattttctcaatttttctggtgaaatgactgtgatcaacacacacacacacacacacaattaggaacaggaatacacaataaattgttcataatcaaacttctgaaaaactaaagacaaaagtcttgggagccactagagtgggtaaagacagcttgcttttaaagggaagaccgaaggccagggagcagctaataggatgaggatgaagtggctccctgaagaaggatctgcctacccagatcttacatctagagaaaattgaccttctgaaaaaatggaaagagaagtatacccagccaaaggaaaatggagagggtctgtcaccaccagatctgttgtgaaaggatggctgtcaagaataatctagacaaaaaggaagtaaatgaagggatcttggcataccaggatgggaacacacacactaagcaaacacgtttgtgaacaagattcactttccatagtttggatttttgaattattcttatttttattattatcaaatgacagtttggaaaattaccacattgtctgatatagttttaagttatatatagaaaacattggagtcatttacgccataaataggggacataaaaggaggtgaagtgataacaggataccacagcctgagttattcataatagatagaaatttgtcacctcactgctctggaagctgggaagtacaaaatcaaagtgctggcttttagcaagggcctccttactgtatcataacaaagcagaaaagccaaaaatgagaggaagagaataagtgatgagattattccatcacaaatctacttctgtgatagccgcattaactcatacatagggggttcttaaggtcccgccccttaatactgttataatggcaattaaatcctaacatgacttttggagaggaccagcattaaaaccacatcataatgttcctatctgtcacttgaactaatgaaaagatggagtaagtagacagaaacctactacaagtacatggtatcctatctacagaaaccactggtgcagtcacactaaaggtataaataaatactatacatggctcagattgaattctacaagaggtttaagtaacaggaaagacagaaaagaaaagcaaatacaaaacaaagaagaacaacaataaaaagacataagaaccaatcgataaaattatattaattataaatgctccaattaaactaattaagagagagagagagagagtagcaaaatggaattaaaactaactttgacctactatattctatctatgagaagttaactgtagctacagaggggctggggagataactcagcagattagagcacttgttgctctcccaaaggtcctgggtccaattctcagaaccaacatggtgactcacaactgtctataagggagtgggaagaggctgggagtcatagagggaggggaaactgtaatcaggttatattgtataagaaaagaagctatttacaataaaagaggataaattatctataaatctagtctcaggggtctgataccttttttaggcctttaatggcactgcattcataatatgatgcacagacatacatgcaagcaaaacactcagacacataaattaaaactaaaggaaaattaaaataagtaagatatttattttaaaatatgattataggggaaatctgaaaataaagactgcatgagacattatgcaaacattaaccaaatgaaaacatgaggatctatgttaattttaaataaagcaggctgtagagcaaagaaaattaccaaagagggacattgcatagcaataaaagtgtcaattgaagaagaaaaagaacctgaaaaatatatgtatcaaccaatagaactatagactatatgattcaagaacatctagccctgaaaggaactgaaaatctgtactgtagttggaaatatctacagccttgtcaactgcttgcaagagaaaaattaagagtctcatggacatacaaaccacattaagggcaggcctcatgcctagcagtatatggtcaacacaaaatgaattcaatgttattttttgaaattttgttttcttttggtctcataatgtgttgtttgggcatttttaccttactagtctttgcttctatattatgattacaaattttgtgtttttatggtgtgtgtgtgtgtgtgtgtgtgtgtgtgtgtgtgtgtgtgtgtgtgtgtgtatctcctgtttttttctttgttacttttctatttgtttgttttgttttattctggtttggtggttttttttttatttgcctgcctcttttctttttcttctgtttttatttttgttttcattttaagtttttggagacagggtttcctctgttgtagcaactctagctgtcctggaactcactttgtagaccatactggtcttgaacacagaaatctgccggcctctgcttcctgagggctgggattagaagcggggactaccattattttgtgtgccttcttgtttcctaaagagaaaaagaaaggctgggcatggtggtgcatgcctttaatcctatcacttaggagaaggagacaggtggatttgaaaccaacttggtctacacagtgagtcccaggacagccagagctacataatagagagaccttgtttcaaaagtgtgtgtgtgtgtgtgtgtgtgtgtgtgtgtgtgtgtgtgtgtgtgtgttgggggggtggagttttatgagtcgggaacttgggagaatctgggagaagatgagggagagaaaaccatgatcagaatagtgtatggaaaaaagtacattgtaaaaatatatatttcaccagaaaaacaaaacaaaacaaataaaatgccttaggtccctggttgcaatgattaaatagcctcagacctttaagaacaaaaaagactgatagaaggtcaggcgttggtggtgcatgcctttaatcctcgtactcagaaggcagaggcaggtagatctctgcgagtttgaggccagcctggtctacagagtaagctccaggacaggctccaaacaatatagagaaaccctgtctcgaaaaacaaaaacaacaacaaaaaagactgatagaaagaacactacccatgaaattagaaagactagataattataccactattggccaacaggctataagggatttaagtcatgcagagtatgtatccaaccacaatgcagcaaactggaagtgactctttgacatgctaccccaactcaggaccccagtcatctctgccctctcaacacagtccttcagctaacccagactcccacctcccctctccatgtccacagacctccagcgtttgggttgagttttgcagtgttgagaagctttttatttgctgctgggcagcagtggcagtggttttttttttcagatttattttatttttttaattgcatgtatgcatgtgcatgtatgtgagtgcaggagaggcagaagagtacagaactgtcattgtgggacagccacccctcccgcacaaacagctctatgcacaaagatcattcaaaatgaagtagatttttcttcatatcatgtgcactgtctaggtgctgagctctgtgttgaccattctaagatatgggttaaaatagaaagaaggcctgactcctgtgaaggaagagcttgattcatggtttgggaaaagggaccacacacataaagtgtgaaatacgtatagggcattagtatctaagctacatcatgtgatgggacctgcaatcagctgggttggctggagtgagttctgcaacccctctgtttatgcttgactagtctgtcatgctcagcatgggacctcaaagtctgaaggaaaaacaacgaggattggaaaggagacagaataaacataatatgaacttctctgtgatattcagcgtcaagaaatatcatattctctttccttgataaaataaacctggtgtgtgtacctcctctcctcagtgtcgagagccccaggatcagatgttgggggggggtctacaacctccctctgggaagaacctttgggctttctgggcaccaggcaactgtccacatagaggagatgacctccctagcgtctctatatattagcttggtctcaggagctgtcactgaggagttcagagtcacatgagtcattggaacagtgtttctggttctacctcaaggtcccttgagtgggtggaccaaagtgtgtacagacatctgtgttttaggaaacagtgtctccaagtcttggggatccctcttgccaaccttaagctcatggcacccattctttccttgttagaccctcagccatcttccccagctcaggtgttcatctttgaaaccaaaagcccaagaatgagttacctcctgggaatcctgtgagccaccactacattcagaaacaaacaacctccaagcaaacaaacaaaggaagcaaggcatatagactagtgtatgcctacaatcccagctcatgggagacaagattcagagtcataggttcaagactgtgtggggacctagtgtctcaaacaaaacaaaacaccactcccaccaaaaccaatcaacaaatagtaacattcataaaacaagacttttaaacctcctctcagcactggtgtgcacacatgggcaagcacacccacacccacacactgggtaatcaaatcaaggcctttagaaattaaagacttcccccgttgaaatagaagatctttaactaaatgtaacacaggaacagtaatggcatgaactgtttcaacccagaccctggctcaaccattcattagtccagcaaaatgacttgcttggttttgttttttgttttgttttatttttttttcttgtttcctggtgttttttgttttttttgttttgttttgtttttgtttttgtttttttttgtttcctgcaaattggggatgaagaccaaatcatgggctattgaatggctattgatttaaggttggtaaagtatgctaactacagaatgctaaggctaatagaacacacagtacagttttaacatgggttcatagacattctagaagcatcaggggctcactgctctgagctcagcagtgtcatctgaagcacagggaagatggagggtgtgctgctgaacttgagcaaggcattccataaggaagcctgtctgttatgggctacattgtgtcaccctttgaccctgagttcactggtgaggctctaacctccacgacttcacagcagtcctgtagagggtggtgagttaaaaccaggccgtcatgctggtcctaacttgatctaaacaatgtccttgtaagaagatagtaagaccacagaggaactccaggggagcatatgcacagggcatggcgatgccagccacctgtaagctgaggagagagacctagaacagatcatgcactcacagctcctggaagagactagccttatcgccaacacccttggctcctagacttcagaactgtaaagcccacttagcttattaattatgacaacctggagcatcatccagaggtatatactgtcaatgctacccatccctgaccctcaatcaggaggaggattccatgatacgagatgattcgtagcctgtaaggctaagatatctttatttagataaacaccagccaaacacaagccagagtgtgccaggggcagcaaggcagggaggccagagagaaggggttcccatgtgccttgctgccccttaaaaccctatcacatgtcatcctgacctcaccttgaccacgccctgacaggcatggccaggcgcacctgtagccagctctagcaggcgtggcttacactgtctcctacaattccccttttagtctaaaagaggattaaaacttaacagtgtaaagtatccaaaattaacaatcataaaggtgaaatacaggaagatacaataatatgctatgacacatcctaactatgtctatttcagctaaaccctaaagtcatctgaaaggtggtatccaagcctgaacgcctccttccaatcccaaccataaacagtagtaagttatccctgactaggcttacactaccctaatagacaataatggggcaaaggggtgtagcatcttccaagttacttcctgctgaaatgggacggtggtagccttgtggagttctgtgggaagaaaatgttagtatagtgaaagtttctaatggattatatccagtccatattagatgggatttgcttgattgaagatctaggttgaaatcctcaacttgattgaaatcagtacccaaagctctggtcacagtgtcagttgaaatggagtaagttgtatccagtgcagtctaggaggtatggcccaatttccttccagagcgtccagggattgctgtcaggcaggtcttcattggctgtgtgggactcaaacataagtgttagcagagaaatgttttattgaatatgtgtgcatgctgggaaaggcaaccatggaaaaatgattatgagacggtgtactttcttgaagagtcaagaaagacaaagacagtccccaaattcttctctcattctgtattacatcaattggcttcttgatacaatacagaaactctaaagtttagtaaaagccaaatccaactctaaatccagcattgatttacttgaatagggactagaaaaataaagagaaatagatttaatgcatattttactatatggcacattccttttgtttgatggtgatagctaccttctcttcttaagcatctatccatggaacatgtagtgttcttagacttctggagataagttttcctgtgaagatagaagcaaaatacttccctttcctttgggaggtttctattcagtttactagatgtgcctagtaaaatacctgtcacttgtccttgtggagaggtttgtcttatggaactccaatcttaatcaactttgatggtatccaaagtttttcttctcctgtggaaacaaatgcaaaactcctaccccaacgtaatacatgtcctggtttccatacagaggttagtacatctttgaagtatactggctgattcacttcagcagtttttccatagtccagtgtctttctgcagctgtttgtcctttttcattggcattaagaaagtttagtgtcaataaagcatatgcaacctatgtttggggggttttgtcttcccagcctgtctatggagcatctccttaagtgttctattagatctttcaaccactgcttgtcctctaggattgtgtggtatactggtgacatgctttatgttataatatttgaaaaaccgttccaattttgtggagacaatatttgaaaaactcttctatttttgtggagacatatgccagagcattgtcagtttttatctgtgcagatatacccacaactgccatcacctctagcaggtgtgtaataacagaatcagctttttcagcgttaagaccagtagcccattggaaccctgagaatgtgtctattgcatgatgcacatatttcaaatttccaaattctgtaaagtgaaagacatccatctgccagacctcattcctccgaatgcgtttagaactgtagcctgctggcaatagagtttggttataaaaggaacaagtaggacagtttttcactatctccttggcttgttgccaagtgatgaagaagtcctttatttaaacctttgctatttacatgatgtttcttatgaaattctgaggcttctagcacacttccaattaataaatgatcaatctcatcattgccttgtgctagtgggcctggcagacccctatgggatctgatatgtgtaatgtatagaggattacttctgtttctgattgtttcctgtaattgtagaaacagtgaagttaattctgtattatcaggaatgaattctgcagtctcaatatgtaagatgactctgcatattgggaatcagtaactatattaagaggttctgtaaaacccataagcaccctgagaattgcatataattctgccttctgtacagatgtatacggactttgaactattttacttacctcacgtgcttcataaccatccttacctgatttgttggcatcagtgtagaaggtaagaactccagaaatgggagtttgtcttacaatatgtggaagaatccagactgtcttttttgtgaatttaattctgtcagttttgtgatagttgttgctaatcttcccaaaaagtcaacaggacagtcccactgtcaacagtaattaaggtttgcacaacattaaacatactcccattttcaaccatgaatgacaattccccaccccacaaacataaacacagagtcacaagtttggaaacgtttaaaaacatcacaacagcagagttggagtggaaaattcttgggggttctgtgaagggcaaaaatagttacagaaatggaagtcaccctctttggacatgggctacatggaggtgggctctgtccatttgtcctgtgctttttaatatcagcactataaagccagtgatgcctaaaagtcaacagaatgcttctgagtgaatcaaattcatttcctagttaaaaagcaataaagtggggggttgcaggggaggggagggagagggagaagggagaagggattgacatgtgaagcaagattgttcctaatttgaactaataaaaagaaagcaatatagtggcctaatcaaaatagcattagtttgagtctggggagtgacttagtggtaggtaaatgcatagcatgtgctcgggtaccctgggttcaatcgtggagtgtgttaacacagttgatatcccaagagtgaccctataaacactagatatcttaggttaggctcaagaaggatttaaactgttgcaaccctgacactgcttccccaaagcttatttccgaacccgctgggatttgagcaaaggccagtgatatgagagtgaagtctgctgtgatgggagaaaaaggcatcaatctccatgcaggactggggtaagagggtctattaatcctgggacaaacttgaattctgcccctatgtggaattaggtaatttgcttagcttctctgaacctcgatttcgttactggcacagagtaagaaggcctgcctcacatgtttttctgaagggctagggaggaaagcaatgagtgttccacacagagcagggatgtggggggtggaaggtgtagtcctatgtctctaagagcccctgtgtctctcctgctgctccagggcagttgtcatcctcatcacatggctctggagagtgacatttgtagatgaccagggcagagttcatctgtcccaaacagaaagccacaggaaaaatcctcacaggcttcagtcctctctcataggtcagtgtccaaatgtgggtccaggaacccagggttccagatcaactgtgggggaccctttgtaaatggtctctgtcttggccctggttgaaaggacagccactttacagagtaaaaaagagggggtaggctctgtgactcattcttttggggtgagacttttaacagtggggagacattccaggttccagacatatttgtaggtcctttgtaagcttcaatgagtagtttggggaccattcaaaaggggcctgctccacattgggatagagatatgttcatggctagctttttcttggcgtaagcatagcttgaagaggtaccatttgttttcagtcaaactgacatcatattccccctaagggggcaagggcagaggggctgccctggagcaattctccagcacaactccagagcagaaggcccccagccagctagctggaaagtctgggttctaggcccatctggtcactaactgactaagtcctctccccagatctgtgtattttctgtctgtgaaaggggtgggaccacccaagatcattgaattgctgacccctgggccaaatccaactggtaatcgtgtttgtcttgggccaacaaattattcttaagagactcgtttgcctgctttggaaagggtgtgtgctctccacccagaggctcgacaccctgggattgtgttatatcagccggatcctgccttaggaatctgctctatccctgcaaacatctgcagccatctcgctagggcatcttagaggcttccagtcaccggctctcctggttctgtggttttcaatggccccttctaatttccgccgctgccacattgccatacataccaccctccataaatatttgacaatcccaccttttgagttaattattcttttcagaaagccagggaaataaaggacataactccctgagagaaaatgaagagaacaacagctataaatagcacagtggcaggttgatactcacccccacccccacccccaatctccctgggttaggatggtctgatacctgcctggtagcctggtagccggggctgaggctaagtgacatcagctcagattacatacagagttgcagacttcacacagtcaagcaacgcgaagcctgggccacagctctgcagaccagacaggtgtgtgaccgggaaggcatgcctacacccacaccttagtgcagccagaaacgacaccctaccactgcacactctttccaaaagcacttgtgccataaatagatgctccctactcttcttggggggtctgtgcactgagtccttccaaccttccataatgtcctcaattcatgaaccagataaacagagtttaaaagacttcaaagcaaacactgagcagagccatccttgactcattccccagtgggcccttttctcgttgtgtaaccaaagagcacttgacagaagacacatatctcgagaactagattttgttggttatttatttttttttaaacctcaaactttgcagtattgggataattacggcttcgtggagttgactactttaagctgtcagtcatttgaatgctgtaatcagtgctttgtaatcacaagctctcttcccatctccagccctaaataaaacatgccacaccccaaccgcctctacttcagagcgttccaccctaagcacaccttaccttaccttaccgcccagagtgctccaatgatcggtcttttctcattctccgggactcctcccacttcatgccgtggtcctcctccccagagaaagtctatggtcctcctccccaagaaagtctatgtcacctgagagaacaagaaccaatgtagaggctcaggtttgtctcacagtgcaagaaaagtttgggatcaagacatgaggaccaaatgtgtggtccccaagtctctagagtagctgaggcagggaagacagtgaaggcagagacttgtccatctgcatcctggcatccagatcgatgctgggaacacaatgaggtggagattttgtaaatgttagctgagtcaattcctgaataaaagaaggtctgagacacatcctatcatgtgaccttcaaaaagaacccactgagaaaaaagcaaattgcaaactaatatggaagggaaatggaaaagaatatgtgtcctatggtatattttgctttaaattttaaaaatttcattttaaattatgtgtatgggtggagtgtatgtccaggtatcaagagaggccagaagagggtagctgtatgtatctcctggagctggagttacagtcagctctgagctgtcatgtaggtgctgggaattgaacccaggtcctctggaggaacagtcagtgttcttaactgctaaaccatctctccaaccctagttgcgcaaagttgtactttgcgcaactaggggttacttcccaagccactgactttggggtgagcagaataccttattttgcataatgcacacattcttgaatcattcaaggtcagggaacaagcctctattacttggtcagctaacagataaggatgtgttagacctcgattgaaatacatcagctctctgatacgtgattctacagaaaggggattgtttagttcatcagcactgaaagtcacagtttcctgacttcagatttaaaggaattctaagtgtgtgtgtgtgtgtgtgtgtgtgtgtgtgtgtgtgtgtgtatctttttaaaataccagaagcaactgttagtatcctcagagggcagaggcattggtagaattatgggcatttgtgagcttcctaatgtgggtactgagaagtgaacaaatcctgtgtaggagctgttggtatcctgccttactcactgagtcacctctccaggcccagcgattccctaacttttataacaaatgacctctctccaccaatgccagcggtgagggcttaaaaaaaaatgctactaaacatgttaggaagtggtatgagctacatttagactcaatatttatttgctcaataaatattcattgagggccacaactgtcttacgggcttttaagtaaaacagaaactgtagacagaagtcagagtgggctttttatagtggcccctcaagctgaggagtgtcctaagaggggttggctggtactttaaattcttcatctcggtcgtttttcctctacctttgtcatttgacaagatgtggtcgtgtgatgttttcctgtaaattcgtcataactataaaagcatagtaagtaacacagagacccagcgtaaacaaagttcccagtgagaacactgctgcctcacagactttctccttttctttttttcattgcagttttaagccattaaaatatttgctcgtgatttatttttcctgaagatagacgtagggactggtctatttttcacatttcagtggagtctagttttaaaaatactctccttgaccttgtggtgaaatgtgaattaagatacttcctcctactgccctgtgcgaaagcgctattcatcagtgggtgttttccagcacatttcttactctttcaaaagtgtaaacacagcaaagccctttataatcaaggagtgatgccatcccagtgtgcacttggaaattaacaacagggccttcttatttcccataaacttctctcttgtcggctaattcctccccccaccccccacccataccaaacccataactatatcaaacccagggctaaatcaagggaaatgagacgtgacctattaaaaaggaaatgaataatttgagaggggaaaattacatctgtggctggaagcatggacatcatggcttagctgtgcaggtttattctaccactgtacccagtgacttgcttctgggtggcacctcctccatcatcaaaattacctcatgacgtcagcaaaattagtcaaattgtgtttagatcccatcaacttgaattttttttcaagattctttccatgggtcctttttaaattaatgaatgtatacatagaagccctcttggaatagttgttagatcccctagaactcaagctaaacctggacttaaatgatttgtgtaagtgggctcatgggtcaatgtttcattggtaaaattattagcagaattccttgtgccttctaagtagcagtgaaatcgaccttgtccctccctgtgagccttgcaggatcgacaaagaaggaggttgggagagccgagaccttatggatgcacggtgctgccaaagttcaagtctaaaagcagcctgcagattggaaagtgtcacatccacacatcatgttaataagtaccatcatcataatcaagatttaggtggcttggctgagcctcttcatgcttgggtaactatgtttgctaagcttagaaataggtctgatagctattaagctctgcattccaggcctgagccaatcaaatttactcctttaatttcatgattatggagccgggtggtggtggtgcatgcctttaatcccagcactcgggaggcagaggctggtggatctctgtgagttcgagaccagcctggactacaagagctagttccaggacagcctccaaaagccacagagaaaccctgtctcgaaaaacaaacaaaaacaaaaacaaaaaagattcatgattgtgaacaactatatgtcagcttcctaagaagttcttaatgctctaaactgcaaagaataagaacattcaggaattgaagagtgggtgaggaagttacagtccattcacagaacaagggtgctaatgttcaccaggatctgtaatagacacttctagtcagcaatggaaaataacctcaacatgggtgaatctcaaaaacagtgctgttttcttttaagatacaaaaagagaacatagtacatgatttcatttggatgaaattatagagacagcaaaaactacttcataacggaaagagaagctcaggagctggaatggagaacaaccagcttaaggacaccaggaagtgtgtgggtgatagaaagttctaggttgtgattgcaagggatggcatgaggatgcaaatgttggagaaattcatcaattgtgccccaaatgggttttattttacatatgcttatatgagtgtagaggtgtggtcttgttggaggaagtgtgtaactgggggtgagcttgaggtttcagaagttcaagccagttttctgcctgctgatctggatgtagaacttcagttacctctccagcaccatgtctgcctggtgctgccatgcatcctgccatgataatgtactaaacctctaaactgtaagccagccccagttaaatgttttcctttataggagttgacatagtcatagtgtctcttcacagcaataaaatcctaactaagacgatgagtatagttaaaagaacagctaaaaagtatcaataacaagtgtgtagcctttgagtgccatcctggaagactggaggagagagatctgaaagggtgtagcctggccttcgtcctcttcccagctatacgggaagatgggctgaggaaggaaaagaatgtgttttgttttctttactttgtgtccttctcataagcagtattaattttatactaagttgataaatgataaagtcaaggtccatgagagaagtcgcccttgccctagctgggtgtgctcactcgtatagtataagcttgcttccatgtgaggtgattgtgtataaacgcatgtcatacagcatgccttaaacagggtgagtctacaagactccccagggctgaggctatgggctcagaatctgggttgggtacatttatgggacctcagcttccctgagcagaaaatagcagggtttcaaatacttagccatgggaatagctgaggacaggttacaccagctgtggtggtttgaaagaaaatggcccccatggggagtggcactattagggatgtggtcttgctggagtaggtgtggtctcattggaggaagtgtcaccagagaggcgggctttgaggtcttatatatgcttatgacatgcccagtgagacagaccatttcctgttgtttataagatgtaggactctcagctgcttctccagtaccatgtctgcctgcaagacacgatgatgcaccatgatgatagtggactgaacctctgaactataagcaagccaccacaattaaatattttcctttataagagttgctgtggtcaaggcatctcttcacagtaatagaaaccctaactaagacaccaaccttgaataacttcccagagtgttaaaggcagaattagagccttttggaggttcctaaagaccgtcgctgatttcagacccttttcctcctatagcttttagtattttattaccaaccagtgaacaacaaaacagtctggcccttctccactgggttaatgggcaagtccttcagtcaattctttcattttccttgtcactgagatttggagtaaatcatagacagggctgtctatggtggccagacttcatggtgactgagacataaagatgaaaagcaagtagacacctcacacacaaacaactgtcgccccccccccaagtttctgtgaaaaccttgggggccagtaggaggaagggtactcagttaaaattgcataagcccaacagaaaaactaattttcagattagcttgccatgtgttatgcttctccaaatggccagaagcaagtttgaccgggctgtgtctgacaggctggtttggggaagcctttgaacaccaatgcttgtgatcctgcagggcctgggactaaccgacccatctgtgtactgtccacttcggaaagagaaacttccctgatggcattcgaaagaaaacaccaagtaaatcccaaaagggtaactttaaaccaaagcccaaccaagaaagagaatgggagagagactggcagctgaggccgggtagaaataaaagttccattgtcctgacacggatggtggctccccggctgccagccacactagcatgctttgccttgtggtttgtgtggcacacagacacttttgccctggagagcacattccagtgtcagagtgtcaggcggccttcaccccaaactcttcagtcagtgggggaactcacactagagatgggaggtcacagtgtggaaaatcattggacactaatgagcctggcgctgtatttaccaagaaataaaggagcgatgttacctgaaagtggtgtattcatggcaagagtcaaggaaaggttaggaatcagggagcaaggaagaaggggtgtccaagttcagctaaagctgggacatgggacctgcctctatgaatcagcccaggttccagattttaatttccctgtttacacttgcccctgggatcctggaagcaactaagaaatatccccatagccaaggccacccaacagctgactgctagtagagtctgcctgaacatccgtttgcttaatagagagcccttctaggagcaagaagccctgaaataaaggtattattaatttatttatatttattttaggataaatggtttaaagagcatgtatgaaaccaaatgcaaagcacctaacggttgatccaagcattcaatgggattgaagttaggccatcctgagctacctcaggagttttaggccagtctgagaccctatctctcacacacaaaaatactcagacccctaacgggggggggagaagggcaaagtgtgtttgggggtagggggtcgacagaccattgacagaagagggcagagtggaaagaagctagtgtgaaagtcaagatgtcacctgatgacaaggaactaaacctctgaactgtaagccagccccaattaaatgttttctttataggagttgtcctggtcatggtgtctcttcatagaaatagaaaccctaactgagataattggttttaacaagttcaaacagtgcatataactgagtgtctagtgtgtgtgtgtgtgtgtgtgtgtgtgtgtgtgtgtgtgtgtgcctgctcacacctattcatggagaagagcttaaaatggcgagaggataccttgagaaacttactaatatcaatttgcatgtgtttcagactgagccagtttttcataaactcatttgaagaatctggcaagacatctgtattgtgaaaactgataaagatgactttcgaatactacagtgcaggaatacagccgaggcaggaccatcatgggacaagagtgtatgtgtagtcagcaatcactcagaggcatctatatgctcatatagtcatccaaaggagggaataccacatccatttttgtttgtggaactgggggattcacagttaactgagaataagaatttcattgtagggctggagagatggctgtgtgatgcagtctcttgcagaagacctgggtttggttcccggccccactttgtacaatcacaatgtttgtagctctagttccaatatgtgttggcttccaccagcatctgcacttacatacatgaatacacacacacacacacacacacacacacacacacacacacacactccatgcactacacttgtgcacacacacacacacacagagaattaaaaaataaaaacttatttgcattcattgttgtgtcttccacagaagtatctttgtgtaatctgttaagagtttgcttactcaatgaatacctacctccaaacagacaggactttttttcttaaagataaaaagatattgaataaggacagatagtatacatgtagctgcaaccaaataatgggttcctagaacattagccaaaatgacccttgacctatgatctagtccaaccctctcatttcacagattagagtctaaataagccatctgaggtcacaaactaatcggtaccagaacctggcatccaactccactgacttttctctctaaaccaccatgcctctgagaatgaggaagcataaataaagaacctcagcccttatatatagtcttcctaacccatcattatggagggagaagacctcagctgttttaatcaccacctgcagaagtacttggcgatccaccgcattacatatttggcaggcccacgtgaaagacgcttgagggctcaggcaagatgagaacgtccatggaatgctttttatttgtaggttggaactgaacactctgagctctggccgctggctttcgagagacttcaggcttgccgctttaatgcttcagtgagcagcaaattggaccacaagagcgtcaatcacgcgatcctgccaagcaacaccctccccgaagtgtgaagttctgcttgctcaaaacagctccattcatagcatgggtgtggaggaaccctcaatccatgggttctatgtcccgcaaacatctgcccctctatgtgattcttcaaagctgagtttctgagttgtggccaggtcacaagcaaccaatcagatgcagagcaacaggctgctgctgctgctgctgctgtccgagtgggtggagcgagcagtgaccagacagcattaagacacagccaggaaattagtaaggtgcaaattgcatagtggtggctgcagggcaagaggaaaattgcagaccgttgcctgaagagagagagaaatggctgggtggtattttagaatcaggcaacagggagccactgagcatagttctcattggttaagggggaaaaataagtaacagctcataaaacggaagtacagtacgccaacagaaaacttcagtgatcctagagattcaacgcctgcatgccctgtaaccttcgcctaggtcaagacagagagcgccctcttgtgttcactcccagtcaccccacccaggggggaagtgccattctgccttgtgttttcacataggccaaaatggcaagccaagagaagaccagttagtgaagtccttgatcacccccccccccccagctcagctgtggagacagagcctggcagcctgctaaccctgcccagcaactcctctggcatgtgtggctcttgacgggatcagattaggagacccctggaggacagactaggaggggacaaccttgagttggccctggggactcacatctccttgaagagccagcttctcccctgcagagtctgagggagggtgtggggctgctcacagagggcttcttacgtttcttttcttttcttttcttttcttttctttccttttctttctttctttctttcttttttttttttttttttgtgtgtgtttctgtggtttcttcttttccctcatttcaggctgtctgaatttgcttagagtggtcaaccatcatggagaaggagtatagactgttttgctccaggagtttcctgttaggcaacaaactcaggcctgcaaggcttggcagccacaatgctgatttttgtggcctggagttgtggctggatttgcttagcttgccacctggctgcaggggatgatttgaccacgagagtagcaagtactgttccggagaagaatcaagcatgctttaaataggtttcatattctggctgtgagcttgggcttggctttcctccagtgcagtgtcttgtacactagtgtgtgtgtgtctaagaactccatttcaagttgagcatcaaaattaacggccatttctcactttggcagatgcccagaaactgaatacacggaagattaacatggcccctgtcaaggatgacatgtggattcgtgaggcagtctgtattataaaaataaaatgaagtggcagttagattccttttgtgtctcctgtgaggtgatgaggggatgctcatggcctcaagcaagaacaagcttcccaatggtaactgcatccttgttttgctggaaggagtttgctttgcttgcctccatttaatattcaaccctttgcagttcaacttccctgctaacgcaacccaggacttcttagatatcaagtccggtgaggacttttctttaatggcaatcttaggtcagtcccttggtggagctggcactgctgacccgtcatgtttcttttctgttggccaccagaggatcatctcttcaagactttctcctttatctccaggtcctccaattctgtcccttttgtagtatctccttctttcacttgctatgctggctttgggctctcccaggcttctgtgcctagttcccttctgctctccaccctcccatgggcagtcaccacatcaacacagctccagtctcagatgggtgcctcaggtaatggtctccctgtaaatctcctgctgactactggcctctgtgtgaccttaccttcagcatctgcagccaccactcccaacccagtagagtcatggtaagtttaaagaaaaatccctgagtagctgttaccacctgagctggtagtgtcatccatgtgtaggccccaactcaaccaagggctcatctttggacttttcttcatctttacaatgttttgaaaatagaaaatgtatttcagattttcttttctcctaagccagcaactcacagtagagccctcttgtgctactgggcagcagcagcaaactgcagttctccatcagtcatgaagtcacaaggggaaaatagttgatactctggtataccacattgctaagccaggatatatgataggctaagtatagaaagtgcattgttttgcttacactgtcccagtgcatgctgggatatctggacagcattaagttgaggagcaagcataggtagtctaatgagtagtcagaaaccagagccctgaggcataacgtgcacatatgcagacattgaaaggactttgtctaggaattctcctccaggacagtaaatggccatgctggtcctcactcttccagagctcttaggcatatagagtgactctatgacccacaaggaatggaactggagaaacggaaaactgaggtaatgattattacctgactcagaacaccagtcctctactcccttccaaacacagagctgctctgatcctacttacatcccagagtgagttcggggagttttgaaaggttcacaggtcttcacatatttactgacttcacattctatagtagaacagcctataccaaatgagcagaggggttgaagacagtactagagactctcagagttgtagtttcctgtctttgggaaagttatggaaagccagtgaaatatcacaatggcagttgtcacgtgttgtcccatctgagaccagactctagcttctttctgccatggtctaaaatggttgcagctatctgtgagcaggaagcagccatacagagcctcctgtctgcactgctttacaagaaaggagacagggtaagagtggactggcaatttcctgactcagcctggtgctcactgcacagctccaatctgccctcggaggtgatcctgcatgtgtgtaactgggcttgacttgtctcatgccatctttacaaaccacaagctctggggactgtctggggtacagggttatctggggacccttctttcccaaagaaaccaaagcttccggtttccccttctcttcatcctgcctctttctctattcaagaccttgcctacagatggttctttgtccccaagctttgatgatctgatgacctcttgctaccatactctagggcagtgcttccaacctgtggggtccaaccctttgaggaggagcatatcagctctcctgcattatcagctatttacattatgattcatgtagcaaaactacagttctaaagtaacaatgaaatgattttatggttggggtcaccacaacatgaggaactgtattaaagggtcacagcattgggaagattgataaccactgctctaggctatctcgggggctaactgtttgggacaacagctgaaaaggactcagcataggtgaatgctgctctctggagctagactaacctgtgctgtgtctctgaactaaccttggaccagacacagatgctaagtctcaacatttttttttaaatctaggagatggttttatttccagtatcaggcaggtgagatatttgggagaatggagacaattaccctaaagagtggtcctcagacttagctgtatggtgcaattgcttaagagcttaaaccccacccccatgccttggctcccgttctagaactgattctattctcatcaaattttcagaactcctccaaatgcttcccacatgcagccaagatggaaaaggtgcctggggggtcttagcacggagcagctcaaagaaccatggctctgctagttcgacaaccacaacaaggctccctgcccaccagaacttcagagctccctacagggaggactctggtcttctgggattcagaggaaggatcttctgccatcgtcctctttcccagagcttctattcccagttttccagaaacagtgacctgagaagctaaagaggaagtgttggcatctggctgtcacgtgtcagctggcatagctgagcagtaggctcaagcacacggtgactggccttcgggggggggggtctctttgcctcaatgcctgtaaaaaaaaggaaggaactgccattatttcttgcctagatatgaaggacacagtgctaaacaggactgcctcccctgtcttgctagttaccagctgttgggaagaaatggaagaaagccagcctgatgccattcacagcaataactgggagcagaggtctcagactgccaccccccactacacacacacacacactgactgggtacttccatcaatcacaccacctaaccaccctattacctgcaccctgcatctggcaggagggattcctgagcccctgagcccattcactttgtaaagggttgcaccaggatcttaccaagacctgaacttccttgcctaggggagaatttagccccaggagaaatagctcagtgcctggctggccggcaactccgttgcctatcctggctctcgagagagttacaggaactccacgccagatggttcttggtccagtgaggatgagccttgagcctggggtgtgactcaggaccaggacaagtggttcactaccagcagtagattatcctagctagaaactcactcagataagcctcagtttcttccagtttccatttctaccaagaactcaactctggatttctatgcactctggccatttaggactaggtgacctaggacagagtaaataatctctgagtgtttggcttgttgatctgtaaactgtgtcaggctattcctacctatataagtgatatgtggaaggaaggaatgtaagacactacagtggagagcttatagtaagcatagcctaagtgtttgatgttattaatcaagtagatattgcaactgcatcagctgaggtgatgtaggaagattccttgtattagtaagaagagatggattaaataatatttattacagacactattattcccaaagatccttctcccctactgccacctcctcacgttctttctcttccttcatctcatcttctctcttgttcttcaagccttcccactctcagcattctcatcccccacaagaactgcttattttccttccagacttgggggtggtggtgggagggaaacagctcgtgacttagtgcccactggtaatttccctggggttttggaagggtcttagcactgtcaggctagtacagcacttttgtttgcaagagggcagtgagaaaattactcttgggcttagggaagcaaagaataaacacgttcacagtaggactcttcggatgttcgtatttttttcttggttgttgatggtccactgcagactgatgtgataccgatgtgccttaatattaatgggtcagagctgagtaagcacggggcccagcaaaaacaaggcaagatgcttattgtcactttccccagctccgaattctgcaggaaaacatcttcgggactgcacttgaattaaaacatcccagcttcctgagtcattaatattctgcttaaacaaaaagtcgggagtgcccctctttgcctgagattggggtagtaatgcttaacccttatatgtcgatctcagccaggctgggcacctgccttccaaactggccgcaccaataaatgtgtcataaaagtcagcctttaaaaactgaggttagattcggctagttgcacgtgccctctccatcgcgcttgcctggcaaagcacacaggtcaaacgagttctactgaaaaaggcactctcagcctctgtctgtgtcgtttactccctctccccactttactgcccaggtgcttccaagcccttggcagagtcgaagtccttgccggatccagaacaccgcctccggatctgaaagccagtagggccagcgatctggctctacataccttcttaggggctcctaaaaaccgaagggagggcgcggctaagtttgtacctttaggggaaaaaaatctggcttttgccttttgcctccgtgaaaactcaactggaacccaagagcagcagcaggcagccggagtagccccaagagaagagctcagagccaggaagttggtgtcaggcggagagcatggtttgcttgtgagctccagggcgttcacagtgcgctggggacacccgacagttgcttctaaattcccgagggcaaagcggcacccaggacgccatttctttttgatgcgtttcctcctgcaagtgaagggccaacaaagcagtctcctataggcattccagtgcactgcgggtgccccatgtaaatgcttttcgtgagcgttaaacaacaactctgcttttgtgtagaaagactagcaagcaaacgcggagccatctttccggacctctctttgattctgtgttggatttgctagcgtttactctgcaacacgcctgcttgtggcccgggctgaaagccccaggcgcccatccctccgcagctcagaagaaagccattgtagggtttatcaaccccctccttaagacctcgggtttcatcctcccccccccaccatgttcggtttgttttctcaagacctaagcaatttttaatgtactctatacttcccgcttaatcctcatcgtttattgtataattatagtttcaaagtgattatgtaattaaaatcatgtttcgttgaaacaggacttcaaaagggcggcagacccccactctggcattattttctagtgatgtaataatttccctgtgatatttaaaataaacacattagttcaagaattctaaacatgtctcaaagcatatagtaggcttgattggcacgaggctggcttgtaaagaaatggtaaaacccatcactagtttaatatatttctatgctcccatgcagggtaaattacaggataatggggcgcaggcgatggtaagctctgtttatataatccatttcttcacacgagttcccattgccttccttttccctttgctgtgtgtggtggttctctgatcccctgacctcggccatgtgttttcactttttcttctgatctcaattccatgaccagcggggaataaaatacaaattgaatagtaaccattcacaggccgctcttttcaaactgttgttaaaacctctttgtcttgtctagcggttgatagataaatgcgttgtgtttctcctgactttcccccctgcctttcttcttcctttttttttttccacccctccttggccaaggaaaaaataaccctcctccaattatacgctttaaaaattaaaacccacacctcctttcaaaccatctcctgggcgtcctgctcgctcccgggtcggcccattggttcggcggcagcaggattcaccacgtggaataaaggaacgcggcagctgagcggagtgggggaaggcgaggtgcccccgtgtgccgtccctgccattgtcccctcctgaaggttcatttaaccgagaacctgtactgcctctgatctcctctcagagctcccagaatgggcccggctggctggggcggccccccctaggaattcctgaggccagggggccagggggccagggggcgagggaggggggggggataaaccccccccttagcccttcgcccttcatccgtgccccctnnnnnnnnnnnnnnnnnnnnnnnnnnnnnnnagaacgagctgttttacagcttacatccccaaagctacagaacgcctccaggtttctgacctgcccttcccagatccctgtcgcttccacctcaagggctgctgctccgggcgggtcaagccaaaaccactaatagtaactgggcgctcgctctgcagccagcccctctcttcccaagagcttccttggagggagggaggtcaagggcnnnnnnnnnnnnnnnnnnnnnnnnnnnnnnnnnnnnnnnnnnnnnnnnnnnnnnnnnnnnnnnnnnnnnnnnnnnnnnnnnnnnnnnnnnnnnnnnnnnnnnnnnnnnnnnnnnnnnnnnnnnnnnnnnnnnnnnnnnnnnnnnnnnnnnnnnnnnnnnnnnnnnnnnnnnnnnnnnnnnnnnnnnnnnnnnnnnnnnnnnnnnntgagcccggctcacatgcttcacattaaagttccgtgcccggtgccttcgtgctttttttcccttcttctcctccaaaagggttcttataaacttcccttcgtttatctagcctggttttcattgctccagttttgcatgggttgactttgtttagtttattaacccacggggttactttaactaaacatttgggctgaatactttgggattggatttcaacgttttctaacgaaattacgggggtttttgaagccgcacagagaacgctgtgttgagtttattagtcaatttaacagactataagtgggggcgggggtgcgtttagttcagttcgagttcgtacccattcgaccgaagaagttagccaagccttgggatagggttccacccgcgtacgcagggcttgtaccccagcatggcctcggggttcgccggcttcctccgttcgcagactggctcctgggcgcgccaagctccggcccatggaacctaggcaggcgacctagggcgggacccagagactagctgggcgacccagagggtccctcccgagccttccacctcctctctgacaggaggttgtgtttggtgctagctgtagagggtttggtggcttccggtgagaggccttgaaaggaaacctggctatggtggaatcttccagaaagagtggagatcaatgaataactgcctgaggtgagcttgagggacgacaggataaccaattggccagttcatctcccgccaggatattccaccaaacccactgtatgttttttccccctaaacctgaagagctgggacatcccagggattcgacacagtaggaggcatagcctcctgccgcccacctccagcttagcttgagccagaagaaaggaaggtaacccgcatagcctgagaacaaggaattttctccaccacttcctgccacacacagactcttggctttcaaggtttgagccttggtgccacctaaaatgcccgtgaactttatgcatctcagacaaaactgagagctgtcgggggccgtcaaataggaagccccagaaagtaggctgggggtgggggggagggacttcagctttctggggcaatagtaaggtgggaagatgaaaaacattgatatttcttatcttaattccggactggacacgcgagtgtcactccgtgaaaacatgtgactacaagactacacccagctacaagactaacaagattttattatttatgcaagaaggacaaatattggaaagagttaagtagagtaggaaatgattctcagcttcccccagtttttgtctggaggaaactcctgttagtttttcatgacttactctagagcagaaaagagtttgcacaaaacctaatgcctaccactttgttcggtgcctcacttccgccctctgactctgacaccccgaatgcttgctgagaaggcctcctctgctagcagcttgtttgcctcggccggccggcctgttttccttggtctggctctgccaatacctctcgagggtgatgactggagaccctcccgttgccgatgtccattgcatccatggggtagttagttatttgaaccggttagttagtagactggtttgttagctaccgagctgtttgataggtggttgcttggcgtgtaggttggttagttagttgttgttagttgttagttgttaggggttgtcactctgcagacgtatctccagtctgacttaacacttctttgggataagctctgcccacaacccgtccctgactagttcatggcagaaagccctttataatacttggggaggcagatcttcatgtttctcttctctcttccaaatccaaccccctgtctaattcccagctctgtagcagagcacctaccctcggtctccccttcctctccaacccccatctcctcccctctgacctccccaaaccttctttccctgaactcatcccattatcccagcttccaacaccagcaggcattcccagggaacatgaggctgggaaacaggtaggctaactgcaggtcctcacccctccctcctctcctccagagccagtccctgatgctgcagccccccccccacctcctctttgcctctatctccaggtgatcacccagatcttctctttcatccttcctccacactgaccctcttatctcagcccccaactccagcaggcattctctgggaaccagccagccaaccaagtcagccagagaagcaaaaagcacaatgaagcagctaagggagccccagaccatcactctctttcctcatcccagcataaaaacacaatcaataacagctagggcaatatgtctccactagagcctagcaatcataccccagtaggtcctgagtattccaacatagctgaagcacaagaaaaagacctaaaaatagcctacatgaatacaatagatacccttaaagaggaaatgaataaattcattaaagaaatttatgaaaatgcaaacagtggaaagaaattaataaaagagtttaagacttgaaagtggaaatagaatcaataaagaaaacttaagctgagggaaatctggaaatgagaaatttaggaactcggacagaaaaccctaaggcaagcctcaccaacagaatacaagatctgggagagagaatctcaggcattgaagatgaaatagaagaaaacatttaggaaatctgagacatcatgaaaagaccaaatctaagaataacaggaattagaggaaggagaagaaaccctggtcaaagacacagaaaataatttcaacaaactcatagaagaaaatttccctaccctaaagaaagatatgcctatcaaggcacaaggagcatactgaacaccaaatagactggatcagaaaagaaagtcctcttggcacataataacccaaacactaagcatacagaacaaagaaaaaatattaaaagtggcaagggaaaaagactaagtaatatataaaggcagacttattagaataacacattacttctcaatggaaactctaaaagccagaagggcctggacagatgactctaagaggccacagatgccagcccacattgctatatccagtaaaaattttaaatcacactaggtggagaaaatatggctttctataattcaattcaagtcccatacttatgggacacaatataagtggtattcagaggaaaattcttagcactaagttcctatataaaaatactggagagatcatgtactagcaacttaacagcacacctgaaatctctagaacaaaaaagaagaaattacacccaaaaggagtacaatgcaagaaaacttgggactaaaatcaataaaatagaaacacgaacaaaaacaacacaaagaatcaatgaaacagagttggttctttgagaaaatcagtaagatcgagaaacccttattcaaactcttaagaagacatagagagaatatccaaattagcaaaggtagaaatggaaagtgggatataacagcagacactgagaaaaatccagagaataataaggacatactttgaaaacccatactccacaaaattggtaaatctaaaagaaatgggtaattttctcaatacatatcacttaccaaagttaaatcaagatcatatacaatttaaatagatgtttaacccctactgaagtagaagcagtaatgaaagtctaacaacaacaaaaaacctcagggccagatgattttagcagaattctaccagattttcaaagaagagttagtaccaatactcctcaaattattgcacaaaacagaaatagaaggaatactgccctgttcatgttatgaggccacagttatcctgatacctaaatcacataaagacccaacaatgagagagaattacagaccaggttctgttatgaacatagagaaaaaactcacaataaaatatttttgaactgaatccaagaatatctcaaaaagattatcctctatgatcaagtgagcttcactccagagatacagggatggttcaacacacataaatcaataaatgcaatccaccatataaacaaagtgaaagacaaaaaccacatgattatctcattagatgtagaaaaagcctgtggcaaaatctaacactcttttgtgattcaagtcctgactggattaagtatacaagggacacacacaacataaggcagtctgcagcaagcccatactcagtatcaaattaaacagagagaaactcaaaacagttccaccaaaatcaggaacaaggcaagattgtccattctctccacacctattcaatatagtacttgaagatactcgaaggagatcaagggaatacaaattagaaaggaagaagtcagagtatctttattagcagatgatataatagtatacataagtgacctaaaattccacttgggaactcctacagcagataaacagtttcagcaaagtggctggatacaaaagcaactcccagaaatcagtagccctcctctatacagatgacaaaccaaacagactgcaaaagaaatcaggaaaacaacatctttcacgataacctctaataatataaaatatcgtggcataactctaaccaagtaagtgaaagaattgtatgataaaaaatttaaggtattgaagagagtaattgaggaagatatcagaagattgaaagatcttccatgctcatggatcggtaggattaatatagtgaaaatggtcatcctatcaaaagcaatctatagattcagtgcagtcaccatcaaaattccaactcaaattttcacagatttttgaaagaacaacttttagctcacaaaaagaaacacaaaaaaacagagacaccaaacaatggaatcaaatcaaaggcccagactcaagtccacagacagacctatggacacctgacttttgacaaaaaaaaaaaaaaaaaaaaaagctaaaaatacacactggaaaaagaaagcatctttatcaaactggatgtctgcaggtagaagaatgcaaatagatccatacttatcatcctgcacaaaactcaactccaaacggatcaaagacttctgcataaaaccagatacactgtacctgacagaagagaaactgaggaataaccatgaattcattggcacaggaaaagacattctgaacagaacaccattagcacaggcactaagatcaagaattaataaataggacctcatgaaactgagaagatttgtaaggcaaagaacactgtcaacaggacaaaatggctacctatagaatgggaaaagattttcaccaactccacatctgacagagagctaatatccaaaatataatcaagacacaaagtaactaaatattaagaaaacaaataacctaattataaatagggtacaggtacaatcagagaattcttaaaagaggaaactcaaatgactgagaaacacttaaagaaatgctcaacattcttagccatcaaggaaatgcaaatgagctttcatcttacatgtgtcagagtggctaagttcaataaaacaagtgacagctcgtgctggtgagaagataggacaaaatgaacactcatccatttctgatgggaatacaaacttgcacagccactgaggaaataagtgtggcagttcctcaggaagacaggaatcaatctacctcaagatccagctataccatccttggctatatacccaaagggtgcttcatcctaccacagagacacttgctccgccatgttcactgctgctctagtcataatatccagaaattagaaacaacctagatgactctcaacagaagaatggataaagaaaatgtggaacatttgtacagtggagtattactcagccatttaaaacataaaatcatgaaatccacaggtaaatggatgaaactaaaaagacaaaatcctcctgagtgaggtaacctagacacagaaagacaaatatgatatgtactcatttacatgtggatattagctgttaagtcaatgataaaagttaggtgaagctgcaatcaatgaaaccacagaggtcaggtacacagcaaggaccaaggggacagatatccctaggaaagggaaatggaatatctatgcatggctggtgggcagcgtgtggctggaatgggaagatcaagtggcaaagagaaggaggagggagagtgcagagggggctgggcgaggaaatacagggagaggcagctaaaattaaaggccatttgaggcgtaatatggaaatctaatactgtagaagtgtgtgtgtgtgtgtgtgtgtgtgtgtgtgtgtgtgtgtgtgtgttttaactgaaatcaccaaataatggggaagacagtgagtcccaactggacatctcttgtcaccaaatgaagcttccaataccagttacatataattgagaaccccccaaaaatctaggctgttgccaagactgtaggttgctctccacaaactgatgacaaagccccattgatgaagacagcacctatacatttattgaacacggagaagttgagctggtgactgcatagagccataacacatacatgctattgtctttgatataggaaggcactctgcaggctaccaaaagagaagtataaacaccaagccagccacaaatcctttgatctacaatggtgtcttgcctgcgagatatgctaattcagtggtgatacaaagcttgtgggagtaaccaacaaatatctgttttgacttaaggcccactccatgagatagaacccatacctgacactacttgggtgaccaagaacctgagagtagattgcctaggaacctagggtaaaaccaaatactactgttttaaaaaaataaaatgaaataaacaccaccaccaaaaaaattacagtggcaatgaaatgactcctaatggtatgctattatactcataatcagtgcctggttcaaccattgtcaaagaacctcctcctgcagcagatgggaacaaacagagagactcacagccagacattatgcagagagtgagagacatcggaacactcagccccaaacaggatgattccattaaattcctaccctcctggctcaggaaaccccaaagaagagtagaaagaaagtaagaaccacaggggatggagaactccaaggaaacaagactcaataagtcaaaagaatagagcacataccaactcgcagagaccgaggccagaaactctctctaattgatagccacctacaaatgaaaactgagtttcctccaggagagtctcactggggaaacaaactgctcttaagggtaggctgctgtccgaagtagatggccaagagaaaacaagctcagtggcatctttggagttccttgtctcaatgtcgtgtcagagattttctttttttttaaaaacttaatcatattttatatttcattttacatctatttctctctttttaccctacaagtactttgtgtacacattatggctcccggcttagtgtttttatggattctgggaagagaaaggaatttgggatgaatataggcacaagagagagacaccagtgagacaacgagcaagttggagatacagaatgggagagaggtaaaaaaccacatagcagaatgttaatttaagttttaagaactagttggaaacaagcctaagctaaaggtcaagctttcataattaatggtaagtctctgtgccattactggggagctggccatcttaaaaaggtcccacaaggaagtctaactatatctgagtgtgcgaatgtgtgggtctctgcatctgtatctgtttcttgttccttttcttgggctcttttccttctgtttgttttgtctgattccaatgttgtcccgtgcgattgtctcgcaggcaagaacaacacaggacactcggatccttctgcagtaaagctttaatgtatcttgagagagagagcataagcttacaaaagcggagaccccgagccaagaatcccgtcccctaataaaggctggcaaccgccgcctgagacgtgtcaccccatgattggctgcagctcatcggaccatatgacgccacggaagaggcagagatcaaggaatggaaagttacccagcgcctgcccgcattaactttacattcggtgcctgccggatgcaggcgccatcttgtaatggagaatgcagggacggctccctacacaatgtgctagtttttattttatcttattatattttgttttattattatcccctagaagccttctcttctttgtggcaatttatttttgttttatgtgcattggtgttttgcctgcatgtatgtttatgtgagggtgtcagttcttggagttacagagcagccatgtgagtgttgggaattgaacccagttcctcttgaagaacagccattgtacttaagcactgagccatctctccagcccagcctgtttgttttccaacaagagatagcaaggaggagcatctttatggtcatttatcccctctcagtttcccattaacacagcttcacacatccagccagtggacctgaactactgggtatcgtaagatgccacaggagcccagctactccaaatattagtgatgctgtgtggcccattccaggacattttgaggtcccagcctcctccctccagacacatatcagtgataagcacttctagagctagaactggtgtgatggtttgaatgggaatggccctcatacacttgtgtttgaatgcttggcccaggagtggcactgttaggaggtgtggccttgttgaaggaggagtgtcattgtgggggtgagctttgagctcatatgctcaagctatgccggtgtggtacatagtctcctgctgccttcggatcaagatgtagaactcttagctcctccaacaccatgtctcctgcgatgatgataatgaactaaatctctgaaactgtaagccactcctaattaaatgttttcctttataagaattgctgtggtcatggtgtctcttcacaactacagaaacccaagctaagacagctggtctgactagttttagtacttcacaatcctgctttccatagagtctacgaagtatgtccaatcccaaccactgtagggggcagttgcaaagtgttgttcttcattgaaccagtattaactgcccattgataaaagctgttcctctgattacagtgagagaggaaatgggcaaaagcccgtctctatatgccttgccatcctactcgagggactacagtagatgttcttggggctccacaagtacccaggctcaggatggagagaccccttcatctccagcaactctggtccctgggtacccattgtgtttctggaatatttagctcaatcttgcagttcatcatttcacctccaaacttggcaaattttgtgagatttcccaagtccacatgcattcagatcctcttaatgtgaaatgttcatatgatccagtctggaagtttaattgtgattataaaaggaaatctgatcagttctgtggaagagcaaaaacagacatatgctcctctctttgctccccacccatgaaaaaaaaaaaaaaacccaacaacaacaaacaccctggaaagaatctgcagttaaaataaaaagcagctggcaataggcccatcgtgtgtgatgataattagacaaatgtttcccaaggttgggatgatcttgtgaagacagcatattgggtggtgggggcttgggaagtggggtagagtgagagcctgcttacagcggggttaagtgataacacaatgtcatacaatctctaattttgtaccttttgtttattgtttttccccatgcatcctgggaaacatgtcttcagctaagagagtgaggaaaaactgaaggctttgattttcaaaaattaaagccatgactagctttgggttgatcttgagtcctgagcctggaaagcctcaccctcctccatctccaacctttcctgccccagggaaagagttaagagtcttaagttaatgcagtgtttctgccatctggggccctgacttgtttgaccctatcccaaattattgtagtcctgggtctggaatagatatacagctggtcaggacgacatggctgcctctgcttctgggtggcttgtgatcaggagagcaggcctgggggctcaagaagggaaaggaagccagcaccgtcagcaagatgcctctctttaccacttctgtcctcctccttagatattagacatttacacgttagtgtgaatatgaaggccatgtgctaaaccacccagagttgtttacattttaagtttaggctttgatttcagatgaaagaattgtatcctcattgaaagaattccgagtatgtgaacatacagaagaggctgttggtgtgaaaaagaattgagggagagatgcggaattctctgctaagctatggagaatgctgatctggtatcctaccacccaaatcaatcataggtagcatggggtggggagactatacagtaaaagcagaagaaagaaaaatggtggggaggttatttttacttaataaggggacctacctgctttgtgattctaaggaaagagactcctaggaaagagcaagtaagaagctgcttgtagcaaggtcagaaggcgtcagagtgaaaaagctggggctctgaggtgggaagtgcagacacctggctgcagcagggagaccagcctctgtgtcagattttaccacaggcctgtgtcctctgtggatgagaaagatgccggcagctctgttgagaaccagagctgggcacactcagaagctggggtgactgggaaatgtattcagtgcacaagtgcatcgtgccctggtgcaggctttggggttaattaatactttgccaggctggtctccaagtcctcatgcctctgtccctgagtagctgatatcgtgagccactgcacctgctaaatgttattctctttttaaccaaaagtttttaaaatacaaaaaccatttcctaagtgagtaaaagtacaaatgaatacagaaaattatagagatagttagagaaactcaaactctacccagaggtaagcattacaacacttgtaagaacctttgacttatgattttctccatgcatggctacctagaactcaccatttaccgggctacagaaatagaaggtacttaacatcaatgagcttgcccttccctgatggggccttcatgcctttccatgccaatgtgcacctagaatatagatttctgtttggtctctctgcctgtctccctgtctttcacttaatctttctgtctatctgtctttgttatttctttggtataaaatacatagaacagtgcacaaaccatacatgttttatataatgagttctcacaagcaaatgcaacagccacaacccatcccagcacccacaacatgccccccctcacatcttgtcactttgcaaccccagccctttccaagataagcactctctggactttctatagcctgggattggctaggcctgagtttgtactttacatcagtgcaaacctgtggtgcacactcttttgctccttctttcacttgtcatcctgcttgtgagcgtcacccatgttgtgtgtatgtaatgcctatccaccctcatggctatatggtgttcaattatgtatgacaggaacttacggcatattaaagacatgttacattcatttatgctgtgaaacatttgtggattttgtggtttttgtttttgttttgttttgtttttagagacagggtttctctgtattgctttggagcctgtcctggaactcactctgtagaccaggctggcctcgaacttacagagatctgcctgcctctgcctcccgagtgctgggattaaaagtgtgcgccaccaacacccacctaaacatttgtttaacgatgcaaagatgtgttgtattcttttaggttccatttgtttaattctgtgaagctgtgttactttgcctgcctaaaacacctgattggtctaataaacagctgaacagctaatagctaggcaggagaggggtcggcagagttgaaagaataaatagaaaaataagagaggaaggagtgaaaaaagaaggagaggaggacgccaggggccagccagccagccatggagtaagaaggaaagaaagacaaatagaatagagaaaggtaaaagcacagaggcaaaagatagacagaataatttaagctaagaaacactggctagaaacaagccaagctaaggtcaggcattcataagtaagaataagtctccatgtatttatttatgagcagggtgatgggtccccaaggagcaaagaggaaaaaaaaaaaaaaaacccaccaactacaggaactgaatttcatctaccccatctaccactgttgaccatttggaaagtttctagtttgggtctatcttgaatacagctcctgtggacaatgttggatgtggttttgtagtgaatacggatacatattcctggggtttatacagaggagtggagttgctagaccacgggatgtttactcactttcaagggacactgtcagatgtcgtatcctttgtaggggccacgtggaattcttttctattcatgcgccacattcacatattcctttaaccatattcccacagatgggtgtttgtggtgatatgttgtttatgataaaaaaataaagcttgcccggagatcagagtgcaaagctaaccacactatttagccatagattccagcctgtggtggtacacacctttaatcccagcactcaggagacagaggcagatggatctctgtgagttcaaggccaccctgagctacatgagattgaacctgtcttggagtcacatgtctttaataccagcactaaggaggtggagacaggaagagatatggttgggtagagagaccagagggtacaggaactcatagcagtctaggcagtcagtctgaggatttgtagagatagatgcagactaggcacttagtctgaggcagcagttagtctgaagcagtctgaggagggagtctaggacaggattgacccttgagtctgaggtagaagtaggagctagtagctagctgctttgcttctctggtctttcagcttcccctcttcactccaatctctgactccgggtttttattattaagacctattagcattcattcaacaggtgtttatttgctctcctcacttcctccaaaaaagagctgagtcatcaggagactgaagtctgtgcttaagtcgctcagggccttcccgaggtactgtaacttggggaatcatcacttgctggatggatcactgtgcacacggaggaaaggtcagtttttgtcatcctcagcacaagcttttatgaacaactcgaagtccaccaacagaatgctcctgtcacctcagtttcagtcctgtagtgtgtgaagccaggaggacagtctcacctgctcagctgcaaccttctctagtgtccacaccaaaccaggtgaagtaagcattaagctaaaaggctccaattactggtgaatataagcaagaaccatcctgagtttggctttttaaaaatcacatcatgcacttacagggctcatgaatccaagtgatatgaagaatgcgaactgaaaagtctcactgactttgattagattcatctttagtcccctgggctccagggccccggacttccctggcattgcattctttgctattctttaatccaacaattaaatttaattccaaaatttttcttagatttattttatgtgtgtgtgtgttttgcctgcttgtctagtttcagatggtggtgagctgtcatgtgggtgctggtaactgaatctgggtcctccgcaagactaacagtgctcagcttttaactgctgagccacctctccagccccccacatgcccttttaatcaaaaggaggcacagaacccacgctgctctgtcttcttttgtcttatctctttgaccaggagccctcttcccatcaggacacagggagcaccgagtgccatgtggtcccattagtgagggtctgggctatcccatggctatttgatcacatccttgctgtcctttagtcccactttctgtttgtttgtttttcagcccagttgtactggcagcagcagaaactgccaactttcctcaaaggaaggaaaatagataatttagctactttctctcattttcatctagaaaaaatgcttttgtgggagagtgcttttcaattccagctgtccagtggtcataaaaaggaagtcagcaactgtttttggcttcataagccacactacagtagtcttcaaacagcttgctcccttagctggaggccagaagtctctactggaggccaaaggtctttgcatgttgtttccactggacctctcttagtgtagacacaagcaccaagctcccaggagtcagtgtggtcagaggctgagggtgtttctttctctgagagcctatgaggtgtacagctaccccatcacatcctgaggactggataaggagaacacagactggaagctaaaaataaaacccagaagacagtagcaggagaattcatcttcagcactcatgaaagattttcaaaagtggtgatgttgaaactgggttatggaaagatttggcaaaagaaggttccagaaagaagttagagattgggtggtgtcttacagagggtttctgttgcttcaatgaaacaccatgaccaaaaagcaagttggggaggaaagggtttatttggcttacacttcagcattactgaaggacgtcaggacagtaactcaaacaggacaggaggcaggagctgatgcagaggccatggaagggagttgcttactggcttgcttcccccgatccacgcagccatcttcttatagaacccaggaccagcagcccaggaatggcaccaccaaccatgggctgggtcctcccccactgatctggatctcacagaaaggcatttcttcaaaggaggctccttcttctctgatgactgtagcttgtgtcaagttgacacacaaaactagccagtataggtggagttagtattcaggcatctgtattggcctgtccttggagttcttacaggatacaccctcagctgcagccactaacagcacctgtgcagattcactgtgttcccttttaaaagagccctgcctacctcccatctttctcgttctctctccctccctctgttagtctgttcctttctttccctctctctgcttctctgtctatctctctgtctccctccccctctctctgcctctctcttctcttctgctattcctgtccccagagacctgtctcccctctcccgtcctccattttcccattcactttcccccaataaaaacccttccacccaagctcgcatggtgtcttactctctcacaccactttttaaattacaacaggtggtatgtccccaagccaactaaaggtgattgaaggtggctgatatgtctggagcagtgatgcatgatagatagatagatagatagatagatagatagatagatagatagatagacggacagaaaatagacagacacacacacagagagacaccagagagtgtgtgtcttactctgtacccctgactgaccaggaactctcttatgtagactaggctagcctcaaactcatagacacccacctaccgctgcctcctgagtgttgcatttaaaggcatgcaccaccaggcctaggtgttcaaaaaatcttggccagaattcagcacaaattcagtaaagacacagccattgtgggcctcactgcagagctcatcaccaagaaagtaacctggggaacacttaggattcctgagaggcagatgtatgggagtggaatctgcagatacagaaaggaagactgtgctgtgcagccttcgaagctgattcaagcaaactaggattcctttcaccatattttcctcctcacacaagcagtccattatattaactgggcacaaggactgtgtcttctgactacatttcactcagcaattattttattgagcattgagtcgagttccatgtaagcaaaacaggcataagactcagtcatgggaaattagcaagctgtatcgtgaaacttacagttccgtttatcccttattccacgtttttaaaatggcactggcttttggtcagctccctcataacaagatgaggaagttccaggaaaccactttcttacacctgtattcttataactgtcaaaaagtttaaacaaagcttttggggaccgctggcctgaatcatctcagtccttacctgctctgtgcccatatggctgtgacctttgcttttctcctctgaaaattagatatgacgatccctcatcaatgtgctgtgggcacaattggtagcatatacggagtgacgagtctagtatacacaaaggcttaatgaatagccccgctgtgtgctctgtgggtacaataaaaatgtgtcaagtctggtttctgcttcacttgggttcagtatctactcgggaggccagagtcaaacgtaagaactaattatggagcggggcctgccagtgtataattaagcggtctggtgaattgtagagggctaactataaatgcaatcggatgtcagcgatggaaaaggtggatttgggatagtggaggattggacttgtgcctggccttgcaggagaagctcaaggtgggttaggagggctcttagactaaggaaaggagtgaggcagtgagggcctggcttgtctcacgggtggagtggcctgaatgagagagagggaaccaggtcatggtggagcatggggagccagcgggtacacagcacgataaaacctggttaggccaatcttggcccagaaaagaggagaaggctctcctcattgagcagtagtctttgctctgaagaaggatggctggtgggtaggcaatggctgctcttaattagggttgatataggagccctaaagaccttatgttgagagcagtgtaactttcactaggggatacattacctagtttacaaaaaacactcgaggcagtttgtctttttcaagtcaatctaaaggtattccttgcaagtttcaccatggaagagggtgtgtacagtatttgtgcacatttggaacaagatgttccaagacatttggcagaggcatggagaacatccctactgctatggtgccatctttctggtctctctagggtggaaactctcaggacactgctgcctcactgcaggaccaacctcagggatgtctggtttctgcatccctgctttgtgtaggaagaagtgcccatcacaacggtatttaacaacctgtggtctagcatgtccaatacaaagaagaatccttttgatcctaattaaggctagggcccaaagggttcaaaatatactatatattttaggctttcttcaaagcctaaaaaaggtgtggcgggggccacaaattaacgattggttgatcattcccaagggatgatgttatcatcacagctggaaatctgagtgggaaaccgaaatattcaataatctaattatgctatcagtgttgaaaaatcatgttcctagcttatagatttaaaaacaaaagcagacaaccatcagataatctgcctgcctggggctgaggagagattaggcaaatcagaacctctgcttcagttatgcatcacacttggtggctgcaagcagagcagccattggtgagatgacaaaatcaatctactcaagcaacttctattaaaattacttacatttaagaatactttaaatttattccttgatagttctatacatgtaacatggtatcctggtcaaaattatcctaaattcctcctctcactcctcccttcctccttgaacatccaagttctctctgtctctgtctctgtctctctctctctctgtctctctctatttctctctctctgtctctcgttaaataactcactggatacaattctttcatgctcatgggtgtgggaccatcctccaggggacccccccaatagaacagtgactccatcttccccagcagccatcaactgccagtagaccctcagctggagcagaaggtcttgagtcccttctcatctgggtggagtattgactggcttgatatttttcaggtcttatgctgacagccgtagctatgtattcatgagtgtaatggctatgccatgtctggaagacagcatttcagagttgtcctctccattctcctattcttgctttctgacccccttttcaaactgttccctgaatatttgcaggggttgagatgttataatggtttcatttaggctgcatacaccaccattacttattcgaggcacttcaaccatctatgagtttaaactttgacagctgctcactacacaaagaagggtctctgatgaaggtcgacagtagcgctaatctatgtatataaatataaatatttagaaggcagtttgactacatgtccatttagcaaaacaagaatactaggttccattctagcatctataaccaggcatgaattccttcttgtggagttggcctcaaattcatgagaaagcagttggttacggccttactgttgtgtccctattgctctaggaggagcacttgcccgacaggtcaatttgatagcattcaagttccaccactatgtaagccagttgatgacttttctttcccatcagcctacatggcatctctgtgatgatgaaagttagtcatcgggaagaagtttctaggtcagttctagtttgatttcttgtgtcctgaaaccaaactgctgtgtcttcagcaatagggtcttaccaaccagctatggtaggcaaccaggagtagtggccacagttcatgctgtttggggacctcccgagatttccctgatctatatgtttttcacatatagcttttattattttgagatatgctcctttttttctgggttgcttcagggcttttaacaggaagagatgttagattttgtcaaaagccttttcttcgtcaattgagatgataatgtaatttctgccattgaatccatctatgtcatctaaaacatttattgattgatgtatattgaaccatctctgactctcttgatcatggtgaatgatcattttgatcaagatgttcttgaattaaatttgcaagtattctgttgagaatttttctatgttcatcaatttaactggtctgaaattcttcctttcttcctcctgtactccctctctccttcctctcttcctctttccttttctccctccctctcccttccttccttccttcctttattttttcctccctttcctcctcattttttttttttttggtcgctgctgttacacctttacatgtttttggtaacagggtaattatgagaagagtctgatgggattccttccttttctattctaagggctaatttgagaagcattggtagtaattctttgaaggtctagtagaagtcacatgtgatgtcacctgggcctggacttgttttagttgggagagttgttattgtttctcaagacagggcttctctgtgtaactgtggcagtcctggaactcactctgtagaccaggctggcctcaaactcacagagatctgcctgcctctgactccccaagagctaggattaaaggtgtgtgccaccaatgcccaattaattgggagaattttagttactgtttcaatctcacagcttgttataaaaatgtttaaattgtcttgttatttaatatggcacatctagaaattcatcttttttttagatttttctaatttagtggaatatttgtttttaaggtaaggcctaatgattttctgaatttcactagtgtctattgtagtggttccattttcatttcgaatgttagtaatttggatgttagctctcttccagttagtttgcctaagggtttgctgatcttgtgtatctttccaaagaaccaactctttgtttcctttattctttgtgttagttttgtttgcctgcttacttgcttgtttccgtttcattaatttctgccttgaccttaacggtttcttcccatttactgacttgaggtttggcatattcttctttttccaaggctctaaagtatgtcattaagttatttattttcaatttctctgacttcctaatgttgccacgggaagctgtaacttccttcttaggactgtgttttagtggattccataggtttggtatgttgtattttcatttgactctataaatttttaaactttccttttgatttctttaaggccccaattattatttaatagcgtattgctgtgcctccattactttgtgtatgttctagggtttctcttgctgttgttccattgtgatcaggtagaatgcaaggaattatttctattttccagtgtttgttaaaactttctttgcgatgtattttagagaaagttctttgagttgttgagaagaatatgtttttggcagtgtttggatgagatgtcctatagatgtttgttaagtacatttaatctaggatgtcatttaattcaggtatttttctgtttatttatttattttgttgggaagatctgtcaattggtgagagttgggtattgatgtcacctattactatagtgctgggtttcacctgtgacttcacatctcatagtattagttttataaagttgattgttactttttgagagggtatatgtttagcatcataatgtcttcttgacatatctcatcttctttgacttttcccactatctttggttcgaatctattttgttggatattagaacagtggtgcttttctcatagattcatttgcttggaatatatgtttctgtccttcttccctaaggtagtgtctttgtgtgtgtgtgtgtgtgtgtgtgtgtgtgtgtgtgtgtggggtgaggtacatttattggaggtaacaaatagacagttcttgatttttgtccagcctactagtctgtgtcctttgcttgggggaattaagaccactaacatttaacatttggggttattatttaaagttatatatttattcctgccattttgttgcatttgtatttttcttctttctctcttgcttaagtattattgtagtgtgccttattcttcttatggcctcatgatggattcatttttcctgggagtctgaaaggttcctttaggtgtcttctgtagaaccaacttagtggtcataaattcctcagtctatttttatcatgggatgtttctcgttttccttcaatagtgacagatacttgctagatggagtagtctggattgtcagttgtctttcatatttttctaagccctcttggcttttaaagtttcagttgagaaagctgctgttgctctgttaggctttcctttatatatgactcttgccacattcaacatatttcctttgttctgtatatttagtgttttaatcataatatgactaagggagattctcttccagtcttgtatgttctgggttctaaatatctcctgtgtttggattggtatctcttttcccaactctggggaaatttgttatagttcttttaaaatgtcttttatacctttagaacactattcttctccttcatccatgcctacaacttgcagatcatgtcttttctgaatgaaatatatatgttgaaatccccactggtaccttcttattattttatctttgtgtctgattgctccagtttagccaccttgtctttgagatcagatattttatcttctccttcattcagtcattctattccacaacactttttttatcagcttgcaatgtttatttttatttccagaatttcagatttttctccaatatttttaatctttttaaaattcccctttagtatatttcattgtctccctgttttattcttttgttttcctgtgttctcaatcaggcgctcacctcttcattcatctctttgaacatgcttaaatttattcttttgaattctctgtctgggattacatctaattcactcttgctagatttcattactatatgattagtaatttgagaagagggatatgttgtgtttttttttttcatgtttcttatgttactgtgttgagatttgagcatttgggatcatttcattgcttgggattttatcagctgtattcttccccttgacacatttgtacgcttaaatgatacttgagtgtggtagaattgaagtacataattcagaaaatagtcccccagtctcaggttgcctgggtggtccctgtatcatctcagagtagaatattaaccgtgagaacagccacagctgctagatattacagctatgcaaatgtcatacttgccagttagcaaaagtggcccctttgacttcaattgctgttagagtttaaacaatcaaagatagtatggagtatactgggattttagttgttaagattaggattggaagggaagtaggatgggtgaagatagggaaaggattgaattaaatttgaaaaaaagttaaggtgggtaaagcagtggatctctgtagctcccatgtccttcgtggttttggaatatgtggaaggggaggctgtaagtcctttcctagtagttccctggaactctgcaccgcctgcaccctggcatcctctgcttctgcagatccagtgtttctactgctcttccctggtggcttagttagagaggacttgcccctggcctgagtctccgctcccctgcttgcttccctgcagagatctcccctgcttgatcccctgcagagatctcccctgcaatcaatcacaagttcatttacaggcctttcctcttgcagaataagtgtttactgtgtgctcttaattttgctgtcttttaaatgtatttttatccatttgttattatgtgagtgtgtgctattttcctcagggtttcagtggtaaaggcttctaatcctccaatttccccagaagcctctaaaactattattttttaatttttaaatttgtgacaaaatacatagaaaatcttattatccaaaccatcttgttactgttttgctggcatggggggggtactgctgtgtacatgtggtggtcggacgacaactatgaatatcattcctaattgtgtgtgtgcatatacaacacatcataacaaggaatcgagtcatgcgattctggaggctagagatcctgtcacctgccatctggaaactggaggtgtagccaaggggccaagtccaaaagtttaggaaggcctccaaaccagaaggcctgatgtccaaggtttggagaagatggacctcccagattaagcagagagctcatctgtcctttctcggtttttgttttgttcaagctaacaacagtgggagttgcctgcctcactggtgagcactgagtttcattgctccaattccagtactaatctcttccagaaacacccacttgaccaaccatctaggcatcccacaggtggactcaaaattaagtatcccatatgcttgcataaggtgcacccacggttctgagcatcccatatgcttgtgcatggtacacacgcagttctgtacttgcctgtgtgcttatctcgtcctctgtagatggatgttcctgctgcttgtaatcttttaagctaacattctgtgttcaaattgaacattacacagtatcatttcccacaggtgagccagaactcttcaagagtgtggctgtgattctgacaacctctctcggttgtgtgcatagccgatgcttatgggatattcttcaagttcttcactcaacaccacaaccactctaccaagtataatccacctgttccatggagaagagtctagagaagcaaactggcttgttccagatgccatggtcatctgctgtaggggtctgtgcctacagctccattgaccttccaattgcagtccttgctcaagatgtatcgtctgtatgaagtccccgccttctgagacagataaatgacactgtgtcacagtgtcctagagtggggacagggtgggacttgaaacaaaacttcaaatactcccttctgtctggacaaccattccctgtccctctcaccctgtgtcacaccccacacacccccacacacccttgaagattctgtgacctctggatgccctgggaccaagccttccttgctgttcccacagcaaccattctcaacacacagacttacacatgaggttccttgtctgtcactgagattattcttgagggcattatttgcttttgtttgacactcacctctgtagcccagcccctcagtggaaataggctgcttctgaagtttgagctggactcaaatctttcacctaatgcaacaacaggacaagagcttggaatctggggcaggggatggggagggtagggagggtggcggaatgacttttgctgaaggcttaggaggggatgcctgaggccctttttagatgccccatagagacttgacagactgcccagccttgaggtcttccccacctctcccatgaagcccattccactgatttcatctgttaatgtgctgtcccccaccactcttgtgtgtgtgtgtgtgtgtgtgtgtgtgtgtgtgtgtgtgtgtgtgtgttgtatgtgcatgtgtctgtgagggtgttgaggtgagaggagggtgttgggtacactgctacttcattcttcactttattcccttgagacagggtctctcattgaccctggaactaggatggtaccatcaaaccccagcaaccctccagtctccacttcccacaacactgaggtttcagggagacacactttgcctggctttttacaaggatgccagggatttgaacacaggtcttcaaacttacagagaaagcactcttgccactgaacaatctcccaggcaccttgttctactgacttcttgttttcttcagtcccactatacatgccttccacacacttgtctgtggccttgccctttctggagatgacccttaatgcatgtcttaatcataacagctagcccccagacagcacagtctatgtggccaacacttacaaatctggatgtgcattcagacagtcatggtgactgcatggaaggttctgttacgatattgcctctgccgcagaagggatggaggcacactaaggtttagtatactgtataaaagtcacagtcaagctgtagggcccagattcacagccacaaagtctagtttcagaatccatgcctttaaccattacaaggcaaaattcctcaagggtcacttttctcagtcactcccacagagtcaacccatggaacccagcaaaggtgtcaagaatctcagaaatcccttaaaggatagcacctagtctagacttacctggcaatctcacaatttcttttggagccacatggcttcaaagacctactagttcttcttgtcatctggatttggctgctgtggccaaggctgcctttttgtgcagaccacatcttagaactttcttcattgtttgtcccttctgatctgctccataacaaaggaagcaagcagcaagctctttccccacttgtgagcatccttgtgatttcatgcatgcattcatgtgtccatctctggagatacggcagaagctatggttgctggagtttggctaaccttaaactaagcctttccagggtagctctcagtctagactgcggatgccagtagaggagcaggataaggctgagggacttcaattggaagtcccttgaagggcagcacactgaggactgtgctattcttcttaggtagggtgggggaaggggctatggtcctcacaaatcaagcaggatttacacacacacacaaaaatccctgctctttcattcactgacagttcctaggacagaggaaacagggagcaaggcagaaagaactggaccccatgggacacatgaattaagccttgggtagcaggaatttctgagcatccctttcccagggtgcatcacagaagagccttcctccacaggtggcctataagggattgctttgtattacccaggatgctcctgttgggggtgccttagctgtcatctgcaagtgggttctaatgttctgtcacgaaggcaaactgaccctcaacagcacgttgaagacacaaatgttctcactgagctgctggctgctgggctactcaccctcatgcccacccccaccccactgaaatagaatccagtgatttaaccaggctgggaggaaagccggctgcttccagttagttccctgcatgtgccccctgttgggggccagctggtgagacaccggtgtgggctgaggttttcatgtggatttgggaaggttcccactgatctgaatgtcatggctgctctggtatttaaagttgaaattccttgattcgggtcaactattttgtgcagagcaaacctgatgacagtccatggggaatggctaagaaggaacactaaagagacatgacagatcttcaaacaaagcgaccggagtttgcctagtggctgtggtcatctgcagggttagcttagacacttttcttgcttggaaatttccctttggaaatccagaacacgctggatcttcttgcaagcctgaggaataagcaagggtttatattgctgaaggtggatttgatttggggattttgtcacaaataattcatagccaaatctggtgatccccctccaggaaccaagtctgctgacgccatttgggacttaaaccaaaaagcacaattatcaagtaatgcatctaattttcatcctgtgccagttggggagctccagaaagaaaaatagagataattcagacgagtgacacttcccaacattttcaaaccaatttcgaaggaccagaattttttaaaccagcctttctacttgaaaaccatacacatttgtgttaaaaattccttcccctcttaaataacctgtgagtttgtgggggtttaagcttattaaccggcactgttttcttgtattaatcataggccattaatttatttcaatagtcctaccactgcgcctgtgtttttcctggctgcagtccagttcctgaatgtactgccgagcaaggagcaggcagtttatcataacacagagctgagattattgttgagaaaagcgcagggggtagggggttggggtctacaagtgcactgctggccaggactggaattcactctgggctttcttgctctccagcaatgtcttgctaaggaggtctcctgtcatgaggtcattccattgtgattggctgagcactaacccttgcctggcattagacttagcatttgaggggggttaaagaggagactatagctgccatacaaccaattaaacatgatattcaacctacaactgaagttaattatgagtgaggcccaatacaaacttctaaaacctacctgaaatattatcagattttttttgctatttactgattgtttttgatcaaatggttcttaggtgtgaactctgtaagtaacactgtggtggtgtagccttgggactttaatatgttgggcatacccatgagagacggagaagcaagcaccacgaatgaggcaaacaggctgctgtcaggtcatagcatagacaaagccagaggttaaaaactcccaatgagtggtgtttgagagacagctcacagagaatgtgttgggagggtggctgcagtcctcttcagctgtccttgaaccccttttcttactgatgagttcccaaccaggcccccagagctgggtgggttctgagtatggggttacagcattaggtgagacattaatcacaaacatgaatcagcctgttctgtccttctgccaagctgttacctgcatctagagattgcaggggaatttattatgttacacaggaagagaatcccttctgtgtggcaggcaggaagagaaccgatcttaggggctaggtgacctctttggttccacaaggactgtgaccaccaggaagggtcttttctcaggtagtccaacccccaccccagccctgtgactcctcctggaccctttcactcctcctgggcccaattatgtgtaggtcagaaactggcttgggctaatatttctgttcatattggttttctgtcagtccaggatggttagcttatacagaaaacacacttcacatccaaaccagcaggtctgggtcaggacctatggttcttccaaatgctcttccttccacagccatctcggccaggtggtgttccttcagtctaaccacatgggctctggaccctccactcaccgcctaattattgcagagtaactatcacttttaaatactcactatggtgtctgtctctactgtttgagggagcactgttggcctgttttcatattttgtcaacactgtccctgtgtcttgacactgatgggactgcacaaccttctaagggaaactatggctcagccacaccatcatgaactatttccttccctttagtacccttagtaaagaagaggccccaggattctcagagggtgggcagcttccccaacacctttgtaaatgtaagtgtggatcaggtaccacaatctgtgttctccctccctccctcccttcctctgtctgtcccttcctttctcccttccttcctcctgctccttcttttcctccttccctttctttcttttttttttttacttaaaaaatgttattgcactaaagttattacaatgcaactgattcctcaggaaactttagtgcctcagacttcataggtcaatcccaatagtgctctagaaattctatttaactctgcgtttgaatgtcacatctatgtagcaaagggagcctggttgttgttggtttttgttttttgggttttttccttctaccttaagaaagtttcatctggaaaacaggcactagagagtgctagaaccaacaggtttttgttttgttttgttttataatcaaaaccaaaagcaaggcaggcccatatcattcatgcaaccaaaagtaaacttggacagttaatctagaagggagaatttcccacaggggcagaatggtccagtatccagtgagcaagagaaagataaaaatacaaagggaaaggcatcaaatgttcaaggagcttttgtccactcctagcaagcccatctggacagcaaagggtccaggagacatgtgtgaacagacacggatgcatgcctgtcaacatgtgtgaacagacataatgcatgcctgtttcacttggaggcacatacatcagggattatgcacataaatacccctcaaagtcaaagtcacttggtagctacaaaggctgggtgtacattagacaaaagcaaatggaaacagaaaaaaaaaaaaacacagatatacacatgctcacctgatgggggacatcctcaataagataagtttataaagtatgtagattaatgattatggttgacacttaagacagagatagcagataagaaatcctagtcattggccagcagcattgtaattaataagagactctgtgtgttatttcgggggcccacatggcgatggggcttgggcggtttggcggaaagatttatcgttgcactcacctgcaatgtgggtatacaagcatgctgtccaatgcatgtcagcaggccaccaccctgtcctggatggagcctatcaacatgattgctcctcagacctctgtttttgcttttagtgtgattaaaaacattggcagacaaggctggccaggattgttgggatgatagggttggcatcctccaaagagaggagagcaagtggtacccaagaaagcctaagtagggtatttagaaggcaggggtgagctgctagggttggggatgctaggcataagcactgatgatgtgatgaacatctgtacctcaaagtacttggggcctcaggagtcaaatcccccggccaactccatgcggttggcagtcttggatgctgtcacccttgcctcaagctaagcatgctgtctgcagaacaccctgtggtgatggtctgtggtccatcatggggaggtcttgctgggctgtactgtctctcctctggaggctgaggcagcaggtgtactagttcaaggtctgtctgctacagagtgagttcaagggctgctttggaggggggcctatagcttagtggtagagtgcttgtctggtttgtgggaggccctagatccaaatacacacacacacacacacacacacacacacacacacacacacacacagagagagagagagagagagagagagagagagagagagaaggagacacacacacacacacacacacacacacacactcacacacggtaatcatagcattcaggatgctgagggaaggagattgtgaatgtgaggctacactgggttacacagtgagttccaggtcagctttagctactacaaaccaagacatgggagtaagggaggaaggaaaggagggaagcaaacaaactacaaaattgaagccatgctagcctctttaaaaaccctgtggcagggagtccaggttaccagagcagagcacatgtcagatgcaggattctaggctatacaatggctgatgggtgtcatgctaccacacctatttcccagacaaatgaaaagcacaaaactgcatcacatttcctgctatgattccagggaaagaattgatttggtacctgtcccagtcagggttatatgactgtgatgaaacaacatgcccaaaagaaacttggggaggaaaggttattcggcttcccctccacataactattcatcaccaaaggaagtcagggcaggaactcacacagggcaggatcctggaggaggagctgatgcacaggccataccctacaggtgtgtctgcttatagctgggtcttctgtgggcactttcccaaatgaggttctttcctttcagatgactatagcttgtgtcaagatgtgtggtgatgtattagttatgatttattaaagcttgtctgaggattcagaaagcaaagtcagtcacaagccatagaagacaggcacacatctttaatctcagcagccagaagctaggaggtggtggatttaggattaagagatagactgggatcacgtacctttaatcctagggaggtatagaaggcaggagcaaggtctcggtgtcagacattcattccccagccacgttgaggataggaagacattgaagtctgaggattctccagccctgctgaggagaggcagcagtctgaggtttggtggagccaggatctcaattcagtctgaggtagagtgagagacagtgaccagctgcttttcttttcttttcttttgcttgaagtgtgaacctaaatatcagtctctgggtcttttatttttttgtacaacaaagatgacataaaattagcccaacatggaacttgtgaaggatgggttacaaatgctaatgaatacttctcttcaagagacggacatcattttttataagacttcaatctgttttccaaatcttttccacttatattccaagggtgccatctagctctttggacacaacccctaacctaacaggcctcagttaaaggcttgtgatatatagagagcacctatgtgggttggtggcatgctgagccaacatgtcttagactcatgtttgaggacacacaggaggagaataaaaaggcatgctacatacgtagtgtctgctggcagcattatccactgactctccactccacacaagggacagaggcctttctagacaaatgccgattctctcccaagggagaggactatcgctcaggaactaaacagaccctcaggatggaaaactcttgcagaatgtccaccaaagggcctgcgacccagaagacacggtgctttgttagccacacaggacataagccaagcagcatgtagcttcctcacatgtaaaatgtacagtatgatcgatccagtgagaatgatttccctgtcggaggagactctgagtgattaaacacaaaagagaacaatctagtatatccgttcggagaggctgatgatcctggagagaaagggagatagatttgtgaagtagcaggaagctgcaatccaaatgcagagcgaatgagttaattacacctggagaggtgacctctccctgtagcccgggctagagctttggtgtcgaaagtcaaggagtcagagctgccaccttcatgtctccagttctatgtgcagccaagagctgtctgcattacccaagtgttgtgcaggattagaggtaggcaagggcagccagcaatggcgaaacgtcaggtctctgagtggagcaggctgtgagatttttccacccattttttctaaactttttactttggagtttttaatctgggaagcaagagaccatcctggggtgacttcttcaagtacctggagaagacaggtatttcagattctggggatattggacatgaattgttcctagtctatgaacgtgtctatagacataaatggggtcattccagcctagacctggacatagtgcctggggcttagctggggaaaatgccagtggagggagggggctgatgtgtaacttgtctatgttctcccttgaatgtcctcccacagcagctggaggtctgtgcccttcctctacccatagaaaagcagaacggtgtccccgtcatttcaaatgaaagttctttgcttttctgatgcttcatctatagcctttcacaccacacctgacatagatcagtcacacactgaagcttgctgaatgagataggacaagaaagatctgtaaagatggaaaacaactcagaaatgatgaaaattcatggggacagtttctactgcctctctcagcccctgctgttgaaaggacagtttatcatgtgaatcaatgatttttttttaaattaagatttagttttgtttatgggtgtgtgtgaatgcttgtgagggtgctctgggaggccaaaagagggggttgtagccctcgaagctgaagttacaggtggtttcaagctccctgaagtaagaaccgttgtcaccaaacttatgacactgctccctttctccagccctctttatcagggattctaagtccttaactatactatccacgagcgttaccatctcacttacagatcctttttgcatctccccttacacatctgttctctgcctcctcccaccttccagtgctaggatcagacagcacacccagccttgtgaactgctgttttctcttcagaacattccatatttctgtcgccagtgtcaatagataccatctgtgtttaaacctacatgacagtaaatgccatgagtagacccaagattaccacccagttgggcatgggagactctgggcagatcttcatttaaggggcagaaggaagagggatccatgagaaactagaaggtggccagaaagataagagaaaggtatgaagcaagaatggcacagagggaagagagagggagaaaaggctgcatcgggaggcagaagtctctggctcataggtgggtttcctaggtggaatgtgactcagcaggaggggcccacagtgtgctttcccactgtctcctcccactaggaaataaagagatttagtcaggtgatgacctttgtattttgaaagagtattagttagggctgcatttggctacatttgagggaatcctaaacagtaaatcacaaccaaaaatattttatttattatttttgctttcagggtcttttgtggcccaagctagctttgaacttactatatagtgaacacctgactcttctgcctccatcaccaaaggcccacaccacccagctcagccaccaagaggatcttttttcttttctttctttcttccattcattctttctttctttctttcttttttatttttagttttttgctcagttgagaagaaatttcaaggcaggtaaaggttatgataactggtcaagggacagaggggcacaaatcccattgagtgcttatttaccatgatcagtaagaatgtcctccttagttttcattttgtttgagacagggtctctctattatacagctttgggtgtcctagaacttgctatgtagaccaccctggcctctaactccacagctatccatctacctctgccttctgaatactgggattaaagacatgcaccactattactggcctcctcaggcatttaaggtaattattcttcctctaaccatcatgcccacactccaagaaaaagatgggcaaaaggatgaacaaatctcctatattacctgagtctatttgcatggaagcctcactccacaaactctaacatgtcattgctcagaactccatggtgtagtttctccttagggtagaagagtctggaaatgggcacagatcatttcttctgtcaaggaaaatactgggactagatactagtaagcaacaagcaacatcctcgtataggctgaccatttgagaaaagtttggcttgaccattaatagcaggtaaccttcatagattgatgatatttcctagtaaaaaacaaagatattaaagtaatccatttgatcctaatgcaagtaggaagtaaaggataaatcatacccactcctgggccagttttcctcacaaagcaggctagttccaggtattggtgtcagctgaccctctgagttccagctctttccattcccagacagccctctcatgctttttttttatattactatgaaattccaccttgcaaaactagttggaaaaatccaagctcagcaaattgccgagagactaggccatatcaggggagccacttggagccgggggactccctgatgacagacatgcttgaatctgtttaatctccacacttgcaaagtgctggcaactttagctctgggtgacagagagggaagccccatcacaagtacagtatgggtctccaggctggccatggtgcaggaaaaggctactggctagttctgagattaaaaaaaaaaaaaaaaaaaaaaaaagaatctgaggtagggaaaggtttccctcatcagaggtcatttggttactgtagttccattttctcccagtagcctctgttcttgacaggttgactcccaggctgctgctcttcaaatagtgcgctacccagagcagggcagtatctttgaggtgtagcctaagctttaattattttttttgcttgagacaggatcatatgatgtatcccaggatgacttggaactattgagtcccctgcctcagtttcgccaggactgggattataagtatgtagcacccagtgtagcctgccccatataaagtcatttacagatgccccaatagatggtgtctcctccagccacatcttgtctctgccctgttgccctacccaccaatcccccacatctccagaatcatccttttgtcagctctacacatgccagaagcgactgctttctgggaacaggcccgatgaaagaaaagttaggcaaagctgcacaagtgtgccaagccctggcttcagaaaggagagttggttatttccaaggaccagtgatggaaacacaccaagatgaggcccagtggcttccgactcttcaccattgcccagtactctctgcccagcacccttccactgaccatgggagatagctctggggaaattccagtctataatttgttgaagcaggataaacagagttcctgctccatgggattctaacatgaacaagaggctcttggaatctccttaggagtcttgatatccacgtaagccataaacatcagaattaggatatgtgtgacgtaacagattctgaccctcaaggccacaggacaggagtgagccatgacaatatactctcgtcttggactttcatctataaagtgactttgaacagctctgagaagcttcaaagattttgtagagttgccacaaagatttgatgtaaatttccttgtcttaaaaaaaaatgcataaggaagctgggtgttggtggctcacgcttttaatcccagcactcaggaggcagaggcaggcggatctctgcgagtttgaggctagcctggtctccagagcgagtgccaggataggctccaaagctacacagagaaaccctgtctcaaaaaaacaaaaaaaaaatgcaaaaggaaatcaaatataccatatgccacattttgaccactaaagactgccggtatgttcattatcatgccatgtaaacagggcatgcagacctcataacaaaaaggtctttcagtctgcttaagagaaaagcaccaagattgcaaggaaagctatcttaacaacaacaaaaacccatcttaccacatgcaactcattacccaaatgaggattttttttttcttaacattgcacaaccaatgattccagaaatatattggacacagaggcaaatctgactgcccgtatccatctcttcactttggaaggttattaaaaatgccttagcagagtcattgattagcctccatttgaacttcaccataacttcaaagggtattgataccaataaactgctccttatctaattgggtttgtgtcctccaaatgtggtttatattactcagatgtttgaaaggcatcagtgcagaagctacaaaggggcctcagctgtgattcagcttcctgggtgagcgctgaatcaccacgacaggaattcccacaggtgcactgcagggctgcagtgagcacaggaggtgtgatgcggaggagatggtcaaagttacacacacatctagtgcccagtcagtcagtatccattaactggaagagccaagcattaggaggtaacagatctgttctagatttgcaggaaagccagaggcccatgaaagaataagggcaaagaagccaccacagcagcagttgatgagtagagcaggccagttgtagcaaagtgttgatgagaaagtcaggtattgtgcaagaaatgaacagatccttagcaaattgcaagagaaaaccctcagctgataaaactcagcattggggacctctgagtaccagcctcaggattcaggcaagaccctaaacagcatgtgcgcgggctgattaaagggatctgagagtgaacgaatcagctcatacgtgtattcttctcatgtctccttattcttcaaatgttctctttcgtcccacaaggtttccagcttatatacccatacagacacaactatcaattctctggcaatagtaaggataccggacatacatttttcagggccaagaagacaaagaataataaagtgggtacctgttatcttgctaatgtcttagagggggcatggctgtgaagtacccagacatatctgagaacgttcaatagagtaaaaggctacatagtatagaatccaggacctggcatttccagcctctggaccaagcagtggctttgttcctgctgatccccagtaagaagaatttcctttccctggagccttttcaagaatacaaggcacccagtatatattctatatatcaagattatacccagatatatgtgcctagtatattgggaatgtatttatgagacacatacacatatatacaggctagggagagaatgcaattagcatatttaaaattacaggcagaagtgacagatattctggagtctgtatttcttgcagactttgcaaggcgagtttcctctaccagaagttaattctggtgggttgacacctagaatattaattgctacttctggaataagcgataaaggatctcagcaactcagaccttaattcatgcttcaacacttgttctgtttaggcccagagacagggcattggaccctggtgctagggtgcttgcttaccacaaaaaaacatgttctcgggggcacaatcatttctgtaacactgcttgcagtgaatataccttttcagttacatagcatcaaggtaaaaataagaactggaaggatcttgatattccctcatccctgccttgtcactaacagggaggatgctgattccctggatggacatgcagggactgtgatgttctcccttctctgcctatcacacacagcagagacagagattctcagagaaactgccaaaatagggcactagaacccaggtcccagccatcctgataccacgggattagcagggagacaaagaacaatcatttaagaagatcttaagtgacactatctctaccagtgtacaaatggcactgagtagcactgacataaacatctacaggacacatgatggatctgcagagagggactgcagaaggcagtaagggctctctgtgtctccgtcatcatcagcactggggaggtaaagggaagcagaggatgggaatccacagagactgtggaccagtctctgtcttggctcccaaacagagaacaaaatgcagcagagaaaggtgagattgcagcaagagcaccagaagaatgaaaaggtgtttggatctggagatcagagctgtcagactatgactgtccaacaggtaccttgaggtgctttctagaaagctttgttgtgaggaagggtacccttgtgaggccaagaacaaactcagtcagtgactacaaacagagccagggtcacatgcacagtcacatgccagttactttttttttttttttgtaacacggttcccgttctgctcaggatgaaccctttcctgtggcaaaggtaccaggatttcctccttgtccattactggtttaaaagcctgctgcaccgtcacagagcctcctgggtagcatccgtcctctgttgtggtggctaggaagaaatgcccaaacaactgtttggcgacatgatgagagtaaccctgccatttgaaaatctgctgtttgaatcctgtactagccccatgaaaagagatgggcagatgtcctacagcgctgagtgtgtggcttcaattgggaaaatcatgagtcattcctataaactgactaaaacgttttctttctttcataatttagccacaagcattaattaaagcatccaagaatatgtatttggacccataaaatcttcataatgagccaatgcaaaaggaaccactgttgagcctttgcagtttggaaaatgtatttttaagtaacggtgctggagttaaatgtttttcttcagcaaatttaaactccggaaaggaaaacaaaagctcaggtgtgactccaactgcttttaagagtttcctaaggcaaggtggtttatttccctacttacgtgtgagagatagtcctcaaccatacaaaatattacaaaagcttgttgcgagttggtgttaagaagaaaaatgcatcttctcacagaaataagtcattacacatgatagaaagggagccagtgtggatatgcatatggctgatctgctagaaaataaactggatataggcaaaactgagaaagccaggatcctcgaacaaggatttatgaggaacaactgaccctagataagttctactttttcctgagccttagggtactgcttgaaaataggttgcttattttttctaataagtgtgtgtgtgtgtgtgtgtgtgtgtgtgtgtgtgtgtgttcatgtgtgggggcacagtcacacttatgctggggcacacatgtggaggacaaaggacaacctttgggtgtcagtccttgagtcatcttgtgtgagccagagtctcttcaccgtgtgaaccaggctgcccggccctggagattctggttatagtaaacctggctcaaatctgaggtattgaggaaggcatctcagaagaaaactgagtaatctaagacctgaacgatgtaaactgtggacacacagcaaagaatcagagggctcaggaaaaacagtgctttccaagtcagggatctgcacacacaaaatccccagcacactcacatcaggctgcagggtaggaagaaaagggaggattccctcttagacgagacaggacagtttccattctgaaaaatgttgtctgctatgtaggtgagatgtcatatcctacaggtgagttggtacatggtgtacaggttggcagggaagcctatgctaaacacagacacggggcgggggtgtttgtgtgtgtgcaggtttggacagtgtgtgtgtgtatgtgtgtgtgtatatgtgtgtgtccaaggacagcaggacccaagaagccttggaaggaagtgtcacaaataggatgggtttattgatcaaggatttttgaggaagtcaggtaagcagaggcctgcagcttcccttgcacttctccatatcactggggattcggggcaaaagtggtttcccagcagggttcagaagccagatggaacaggtagaggaaggtaagaaagctgcccacatacacagaaagtagcctttccagaagactagtcgaggcagagaggcaagactgtgtgaaaggtgacttcagggagaacctctgtggtttgtttgcttagatggcaggtgaaaggaggcaatagagagacaggcaggaagtgtgagagaaaggaggaaaggaactgtagggaggtgtgtgatttgaatagggatggcccccatagactcttgtgtttgaatgcttagcccatagggagtggcactattaggtggtatggtcttgttgaagtaggtgtggacttcttggaggaggtgtgccactgtggaggtgagatctaaggtctcatatgctcaagctacacccactgtacagggcacagtctctcctgctacctgccaaactggatgtagagctcttcactccttctccagcaccatggctgccatgcgtgctgccatgcttcccaacattacaataatggactaaacctctgaaactgtaagccaagcccaattaaatgtttcctttacaagagtcgccatggtcatggtgtctcttcagagcaatagaacctccaactaagatgagaggttaccaaggagacagtggtgagtggtgtcctaaatgcaagggaaggaccaggccccagaaggaagaaaagtggtgacacggagatgacccggtagacttagaaagttgttccagtgtttttagggagctgagcatgttcccatgggcttccttcacatggaggaaggcagagtgctcctctgaggggagaagagaaatctagacaccctgaccaaacattgtttgccctttccttggactcctccctctccccacagatccctgttcccttcatcttcaagtaatacccttcccaccagctcccttttctagatgttcaacatgtctggcttcctatctagctgaccagatgtttaattaagaggaagcaagcagatgaaattggttcatgttaaggttgctctaacccatgcctcacaacccaattggaaccatttctgttagcaaagcaacccttaactccaaaagtttcagactaaagaacggagtgactacctggggggtgggggtggggcagcacgaaaccaggacagaaatctggacttcacctctgagggcaccttctacccacaaatttccaaaaatgaccactgcagttcacacccccagctggggcaaactgggcctctcctccagtatagcacctcccactatgtggaatccagacagtaggacatgcagcttgtccacaatacctcacattcagttgggtttgaccttgtgaatggtggcttcacatggtgatggtaacactaagcagtgggtcgttgctgcatttcctcatggtcactggaactattgaagcatgcataagctggataaaacagttctgtgagctgcatgtcaaatgtgtggcactgtgggcctgctgcaggtccttgggcccaagagtgcactaacacacacaaaactccgttcagtgaccctgacctctatttgctctgtgggctcagctcagatgtcaaggttgctgcctttggagtcagaaagtcttttaaaaatataatgtacagatcctacccctccccgaagaactactggctaccgatggattatgggagatgggcagccactgtcttcagcactccattaggcaactccaaacccatggctacacaaataagcctgattaaactcagtggttcacaaaacagaataaaaagacatactatggaaaaggatctgtatggaggggtggggggaggttgttgatggggtgaaaggcaaagaggagacgatgaagcaagagaaatcagaatgcattaaatacaggtatgacattgtcgaaaaataaattttaaaaattactatactacaacaacaaataataatgttaagaatgggttaagaaaaatactgccatttggaaatacaaaaaggtctcaagacaaaataaaagttatctgtaattctaattggctatttcacaaggatgattaccgggaactatttagtgcttcattttagactttgttgctgaccgcccccccacctacacctaccccatctccatccccccttcctacctttctccctgtcccttctctgtccatagctttctcattaggggttgtgtctccatccatttactcaccccgccccttttcactgagctaaatcaggaaatgtaaaatctgtaacagaagccttttattcccccccctccatctttccttcctcttctgccagtattcctttatcttggagtgtttccatttttatacaagttcaattcaaaatgtaaaacagtttatgcttttcgagtttgatttcctccctacacttgttaaaacagaccagtcaaagaaaaaaatgcccagattatgatagatccgcctccaagtgcatcacggcttcaattttgagtcttaggataatgatctgccaccacatgtgggttataacttgaggtttccataaaaatgcgtcttgatgaaccaactctgccacagtgccaaggagctagcgtgtctctggacgtcccaggcctgcctttcggtctgtgtggtgaggacagcttgctcaggaaggcaaacaacaggaaaaagagattagggataggacttcaggtgtggttccggccccgtgaggtgagatgctctctgttctagcagctttagaaggtagccattgggagctgtggtgctttagaaaataattatcttatttaagcctacacttgtcagggaagttgaggtcagccacaaagccatcggaaagaaggggctggctgccagagagaacagtttctttgcaggggatggggggtggggtgtcagtttgaacaacttggcttttgaatctagtgacctcctgagaccaggagtctggaaagattaaacacggagcaaactcaggatgcagttggctccccctctcccgactcaaaacaaaaacaacaacagaaatactttaaacttcccctgccccctcaagctgtctgtcatgcttctgcttggattattttcattagggtgtgtttttctgatggaaggccagggccttgtctttgtgtatttgcagagtgccatgtctactcactggtctttagaaattacagacaataagaggaattcggggagctggcagccccacctcacagcttttctgcactgaggttctgcccacgaaccagaatggaatatttttataaggcaatattgaaacattctaatcccaagaaactaaaggaagcctccattaactggatgtaaaccagagcctgtggttggcacggggtcgctgccacttgcatgattcgctggctgccacgctaacgagggcctgttctgtggttaggaaaaaggcagcctgtccttccctgggagtgaacctcacaactgcacgacacagtggagggggcaggtgagacttcatactgcccctgtcctttcagagccagcctcctggagatccagaagttcctgggacaaacttttttttaatttaaattagaaacaatcttattttacatatcaatcccagtttcctctccttcccatcctcccatgcaccacactgacctccatcccatcccccttctgctccccagggagagtgaggcctaagatgggggatcatcaaagtctgtcacatcctttgggacaaggcctaggctgtgtctagcctgagagagtatccctctatggggaatgggctcccaaagtccattcatgtactagggataaatactgatccactaccagaggccccatagactgcccaggcctcctaactgacacccaagttcagggagcctggttgggtcctatgctggtttcccagatgtcagtctggagttcacgagctcccccttgttcaggtcagctgtttctgtgggtttcccaagcctggtcttgacccctttgctcatcactcctccctctctgcaactggattccaggagttaggctcagtgtttagctgtggatgtctgcttctgcttccatcagctactggatgaaggctctaggatggcatataaggtagtcatcaatctcattatcagtgaagggcatttaaggtagcctctccactattgcttagattcttagttggggtagtccttgtagatctctggacatttccctagtgccagatttctctttaaacctataatggttccctctattaaggtatctcttttcttgttctcctctattctttcccctgactcaaccttcctgctccctatgtcctcctctcccctcctctcctccccttctcattctcctagctccctcccccattttcctgtgctcccaatctactcaggagatcttgtccctttccccttctctgggagaccatgtgtgtctctcttagagtcctccttgtttcctagcttctctggcagtgtggattgtaggctggtaatcctttgccctatgtctaaaatccatttatgagtgagtacatacaatgtttatctttttgtgactggattacgtcattcaggatggtatcttctagttccatccattttcctgcagatttcaagatttcattgtttttttttttctgctgagtagtactccattgtgtaaatgtaccacattttctgtatccattcttcagtcaaggggcatctagattgcctccaggttcttgatattacaaataagactgctatgaacatagtagggacaaacttcttactgtgctcaactcgcaggacataggagccaggacaaaaagaatcagatgtcagggagacacagtgtttggcgtgagctggggagaactgcaaagccaatccctacagggcagagaagaggggcagagacatgtcttcccttctgcccttccgtcctccttccttccttctctccctccctttcttctgtctttctccttcctttccctgtcctcccttccatcctcctttctcccctctgtcccttctttctgtctgtctttccttcatttccctcccttccagcctcccctccctccctttcttctgtcttccttgcttcctgtctcctccctcctgaccttcctgctccttccctccctttctgcctcaaactttcttcctctccaccctattctcaattctcccttctcctctctctccctcttctccaatctttcctttttctcaactaaaggtagtaatttgtgtgctccttgctttaatcataggtgtggctttataaagacagagataacttcaaaacaacagttgagatactaacattgactgttgagacagtgcctgatattcgacgtgtgagttgggcagtgggaaagatgccaaagtcttcattaccaaactctcctcccccagaagtgtggaatgccagcagtgtccagcattgctgagcagagcaggttaacactactcaggagatcttgtccctttccccttctctgggagaccatgtgtgtctctcttagagtcctccttgtttcctagcttctctggcagtgtggattgtaggctggtaatcctttgccctatgtctaaaatccatttatgagtgagtacatacaatgtttatctttttgtgactggattacgtcattcaggatggtatcttctagttccatccattttcctgcagatttcaagatttcattgtttttttttttctgctgagtagtactccattgtgtaaatgtaccacattttctgtatccattcttcagtcaaggggcatctagattgcctccaggttcttgatattacaaataagactgctatgaacatagtagggacaaacttcttactgtgctcaactcgcaggacataggagccaggacaaaaagaatcagatgtcagggagacacagtgtttggcgtgagctggggagaactgcaaagccaatccctacagggcagagaagaggggcagagacatgtcttcccttctgcccttccgtcctccttccttccttctctccctccctttcttctgtctttctccttcctttccctgtcctcccttccatcctcctttctcccctctgtcccttctttctgtctgtctttccttcatttccctcccttccagcctcccctccctccctttcttctgtcttccttgcttcctgtctcctccctcctgaccttcctgctccttccctccctttctgcctcaaactttcttcctctccaccctattctcaattctcccttctcctctctctccctcttctccaatctttcctttttctcaactaaaggtagtaatttgtgtgctccttgctttaatcataggtgtggctttataaagacagagataacttcaaaacaacagttgagatactaacattgactgttgagacagtgcctgatattcgacgtgtgagttgggcagtgggaaagatgccaaagtcttcattaccaaactctcctcccccagaagtgtggaatgccagcagtgtccagcattgctgagcagagcaggttaacagggacctgctgtggtttccgaaggactcaggggcaatgcccatatcacccacagaatgcatgtgttccttcttccaaccaggacacacactggagaggctggaactgccccaaagtgggcttacaactttagggcaaccagccccagttacggccccacaagaatgggaaaatttcttctgaaagctgaagtaaaccacatttaaggaataggtgtcactgtggtcattgcagagaacaccgatgtccaccccaggcaagcactgcactcctgtcccatgaagccactctgtaaagtcccagcagagccttggagggcagcaacgtttgggtttcattttcatcttaggagccaacagctgcaacagctacccaaatgcaaacctcacagaatcaggctcgaaaactggtaagtgttcgctctcgggttggttccaactgtcccttgttgaggaaaagcagttaacaatgtaagtttttaaacaattgttactattataagagggttttttaaaaaatgagaacattgttcaatgtagtcacattttctttctaaaaatagacaaataaaatgattcacagatgttgatttatgagaaaaatagtaaagaatataaactaaaatgtgcttgaagaagggggacagagcccctcattagaaactattctgtagaaagcgcccccactcctgttcctgccaggaaaccccaaggcccagcaggatttgtggcactggactgagagcatgtgtgctggctgtacacacatgctgcctctacttgtggcaccttgaggaccagggcacaagcagagatgaagatatgagctctaggcagagcacacactgcagaagtggaccctgctgaagcctacagcttcctgaaggacatagctggtctgcatcagaatcacatagagctggtcatggtagtggacacttgtcattctagcatttgggagtcttctgaagttgagaacagactgcactatgtattaaaccctgaggggctagggagaaagatgggccgaggtaacgagtctggagggctagttaagttaaatggtgaccctgcccctatgcttgcagcctcaggtcagtatatctagggtcaagcccagaaatgtgcacctggcacttacaatccaggttaccctacaactgcagagctcacacttggctttacataataacattctcagagggaaagcattggcctcatttttcccactttcaggatcctgcctgccattgacagttgaggtccatttgtttgttttgtgtgtgtgatgtatgtgtgtttgcatggtcatgtgtgtgtagaaggtgcatgtggaggccagagatcattgccaaacgtcttcctctagtgatctccaccataatttttgaaacagtatctctcagtggactctattcagctagactggctggccagaaaatcctcctgcctctgagttcctggtgctagggctacaagctcatgccaccacacccatgtttttggatttttggggggggtttggtaggtactggggatcaaactccggtcctgatgcttgcgtgttgagcaccttatttgcctagtaagcatctccactggccgctgtcctgttctattaagggtgtttctaatgccccaatttttgaatcagaaaagaagtaattaaaatgactgtgcccacattttgagtgagactgtacagtttctttataatgaagcatttaatgcacatgctacactcaatccaatgttgctattgatagaagatgtggtcctggaaatacagccacatctctactatattgtattactatagtcccatcctacctgtttcaaccttagggctcttcccctaagactgaatctcctggggcttgaatttgttttgaccaatgaaatgtgagttagaaatggagatgctccctggaatgtatctttaaaagctgtgctttattctttccttcctccaccttctgccatgactacagcatcccagacaggaacggttcctttagtctggacctgagtgggaaagatgagtggtggcctggggagggcacagtggcatcagagcccatagcaaccagaggtgagaaataaattttggttcttccatgatctatacccacagagaggagtggttttagccacagccaccgactcttacagctttctcactaatattggcaaaatcctctgctgggtgtggctgaaggaaacatctctgtccggttctgtctggaattttctactgtcatctgaattccctatgttccacaccactatgtgaattattaggatggccacttaatattaaatcatgagtcgtcttgaaaatgctcacagttgagggttgaaataccaaaatgtcaacagctagatctcactaagttaattcttagccacacggaacagcacactaacttctgagcacttcaccaccatggctgggctgcagggccacaactgcacccatgctcctatagcctctccatttccctgctctaaccacactgtaatctgtctatgtgccttcatgggtcagtggtggcataaaatagtgtttatttgcttctactttgtggtagcagaataatgacaatataaaaatcagttgagaccatgcttttggggctccaatacggcttccatgacatttcctgtatcacattatcaaggatctctgtggaaaatgggattttattgcttaaccatgccatgtcccccactgtgctcttccagggtcatacatcactgtcagaacatgcccgtgagtccagatgggtgggagagaaggggtttaactgctgactagctcactgtggatcgccacaggtcacagtgcatctgagttctgtggtgaatgacccacttttcacttaatatgactgggtgtttaccacaccaacgtccaggattccgagcaccaagatgtcgcatgctagagtatgtgtgagcaagggatgaaattcttccaaagaaaaggtctgtaactcagttgggaaaaagaatcagtgggataggccaaatcacagatgtttccctctacttccagctgttattgcttggtgacgaatgcccccaacctcatgtgatgaaggtttggcctctagtgagttgtgttgagagatagtgggacttttaaaggtgacactagtgcgacatgctaggtcactcaggatgtgcctccacaccacccacctcctcttgattgttccttggtcatgacctataaggctttgctctgccttgtgctgctttgcctcaggctaaaggagtgaggttgactgaccagggatgagaaacccccaaattgaatgcaaacaatcttctctcttcctgagcagactatcccgagtatctgatggaaggctatcatgcttaccccattgtctcaatgagatgaggctgcccatggctctgaagtccatattacaggtccagcctcaagtctaggaggacttgatcccgcaattctcaattcaacaagtagccaatgggcactcagaacactcaggtggtgcagtgggtgcttgggttacatagagaaatggggagcagctgagaagtagaaaatgggaccagagttatgccctggaaatatgagatcaaaatgtcaatctatagatcctaccaggaagagccattgccacaaagcacatagttccaaaggtgacacaaccaaaaaaggagatgacaagtggtttttttctgcctctgtagttcacctcctctgggtatgcctcagattttcaccagggcatggtaagactgctgttatttctctgcattttctttttcgggccagatcagtggctaatgccattaacttcatttcacagaaaacaaaaccagggctggtataggaggagcaggcagcaactcctgaggctctttcaaagctgatgagtcacatgagcgatcaaatgaccagagtgtttctggaatgaattagtagttgttcacagcattccggaaagccgtatcatgcaaagccatgctgttctgtgactcattccattccggtctgcttgggaagagaagtgaaattagatagtgtcttgatctatcttctatttctataggagaatgcctgagactgcgtaatttataaagaaaatgcgtttgttttggcttacagttctggaagactggaaagtctacggtaaggcagctgtatctggcagtaagtagatgacaagggaaggagtgaggcaaagaagataatccaaaccaagacctggaggccagaatgaacacaggctgctgaaggggcttcagactgcttcaggtccatgctgtgaggtggaaggagggagcaatgaggccagtgaagaaggcagtggtgactcagggaacctggctttagtctgctggtaccgagaatccctggttgacctggtttggatttaagctgctaggggttgagggggagatgagataataaatgtctttttcttccagtttatttttgtaacaacatttgtacagcaaacatccttagaggacagaggtctagtctctggagcaaggggaaaggcactatatttgaactccatggaaagatatggactccttaggcttgggtttctctgcagaggcagaacactagtcaatgtgtggcacctacctgggtcactccacaatgcctctgtgggacttgggaaacagagagaatgtgaaagtttcctagcttgccatgctgggagttagaaagccaggaggcttgaatattctgtccacatcaatgaaactcctggcattcaacttgttggctttcaagtaggtaaaacttcttccctggtggttcttagatctgtggttctcagatagctattgctgctccaatggtttggaagctgttgtaatattcaaactgagggggtgaaattacctcattctatttcacatatccaagtgtgtgaaactaagaatagcctcaaaagatgccagaaggatttagagaattgactgagcttgtgctttataagagcctagaaagccaggattctcagtgcatcttaaaacacagatgctaaaggtcaatatatgtatgtagaatattacatgcatgtatttgtgcgtgtatgtatgtataaatgtatgtgtatatattaacaaaccagtgcaaatggcttcccagaatggatgagggacaggactttatccttagcattgttggataaataaataaataaataaataaataaataaataacaacccaaacccaacaacatttggaaagtcctgaggactttttaaaagtagtcttcaacccaggcttactcaatatatatttaaaaggtgtttgtagggctggagagagggctcagaggttaagaacactggctgttcttctagaggtcctaagttcaattcccagcaaccacatgatggctcacaaccatcagtaatgagatctggtatgccctcttttggcctgaagaatacatggagacaaaacaatgtatatataataaataaatattttttaaaaaaatatttatattagttatttatattagtttttcacccctgttgacaattcccccagagaagcataaaagaaggaatattttatctcagctcatggtttcagaggtttttcaatcagttacttggttccattgctcctaggcccatgctgaggttcaacatcatgacagtgagcactcggttaagcagatccgcttgcttcatgatgggcagggagcagagagaaataacaatggaggtcagagccaagacagaccctttaaaggcacactgcctgtaatctactttctccaacttgtcctcacttcctataattccaacacctcccagcaggtgttgctcacagtttgaactcatgataaccctttcattaagtcagagtcctcctggtctctgaaatgacctcagggacacatccaggaatgtcttttgctaatccagggtctctcaccttaataaagtcgacaatcaagatcattacaacatctaaccacagcagtaggctaaagaagtcaaaacccacatgctcacttcagtagcagtataaaaagcacttaacaaaattcaaaaacccattcaaaataaaaattcctcaatggagggaaacttccttaaatcattaaagaacatttactggcatcactgtggttaaaaatggaaatctagtcaggcagtggtggtgcacaccttcaatcccagcacttgggaggtagaggcaggtggatctctgagttagaggccagccttatctacagagcagattacatactagaagtcctggttaacaaaataagacaagaaaaataaatagaagacatacaaatcagaaaaggataagatggtcattgtagacagcacgattatgtgcttaggaaatcctagggagtcactaaacaatctgcaactagtaagccagcctaaggggctgaacagctcaaggtcaaaagcctcatttttcatgggtgtgcacatgtctgttccaacattgtctcacactggcactctctcacagctctttacatggtgatgtcataactcagtttgtcaatcactccactggtcttccaggtctttgagagcaggaagaagatggctcagcctctctcaatttaggtatttaacaacttccttaccacatacaaacttattcactcaaagtattcactgagcatgtatacttatgaagtgagtgggtttctcctccccaaaaaaaccatctagtgagaacctcatgtcaccaactgtttcccagccaaagttcttcctgatgaagacaaggagaaatttattttctctcttgggtcatttctcttttgaggtatgtcactttacttcagtatttggaaatgtccaaaatctgtaagcagataataactgctcatttgtttttatccagttatctcagggagcagccagaaaaccagcagaagtcagcgctggatctatatgacaaacacaacaaaatctcacatgtagattctaacattgcctcagtcctcatgttaacaaaatgattttatacaatctcatgctgactgtaaattactgctcagcttcatactagacgaactgctacatggcttgacaaggaatgtcactgttgcaaattacaataatagtggccatgtagcaacatgggtggggcctctcaaagagggccagaaagataatgaaggacactagagaacaggaaggaaatggacaatgagaatggatgtgtaaggcattatgcaaaagctttgttcactgattcctttcctacacaggcaaacctgtctgctgccctcatagaaggctttgtcttggaataaggccatgctacctgagaaggaagaaaatgcctgttgggagagcgcctgttcttgtgagatcaaagcacttcataacagcatcatgatttcttctattgatgacttagatcccaaatagagttagggactggagagatggatctgtggccaagagcactgactgttctcccaaaggacccaggttcggttcccagaactcacaaggtgctttacaaccatctgtaactctaattccagggcagctgatgtcctcttctggcctccatgggcatccagcacacacaagcatgctggcaagacactcatacacataaaataaaaagaaatctttctctaaaaggtagaataattctgtcttctttgtgtagtcctggctgtactggaactcactatgtagaccaggctggcctcaaactcagcgatctttctttgcctcccaaaagctgggattaaaggtgtgcaccaccacctggctctccctcataacttaatctcactttacctggactcatttgttaaaactcctttgcaataactgactgagcatagaaaaaaattagtgtatcactaaattgttaggtaattttttgatgtagtagtctgaaacatgctactataagacacgggcataacacagtgcccagtgtcccctctccccagggttagctctgtgtgctgagcagcgtgttctcaggaagaagtaagagggtccagtgttctccgtagccacatcagctgaccatcagtgaactaaccaccgtaactggcagattttaataagaattcagttacttttgctctatctgcagacagactatttaccgttggctaactagaccacttcctaaacactcggagaacggaaattaactttattaacacttcagaacacaaggatggtaaagaaacatgagcattttcctcacataaatataaatttccatcttagtccatcggccttgatttttcaatctgtattagttcagtatgtacactgcctgccctgtgctctggagaatggactgaagtttttgcttatgggtttagaccaacatttaattctatacgttgggcaagattgggtcaatttttttaaaaagcatttaatgccaattaaagagtagatttgggggcgtttctttggtcagaatgatggagtgagtctaggtccttgttgtatactcatctttcactcggcctgtgagctgcactcggggccaacaagtgatgcttcacattgcttattcccctaagatggaatccactgcttcagaatgtaaaagggacctcacatcaagaagccatgaggttcttcagagccccatttaaattatctgttagcttccattaggaggggtggtcaatgggtctgcacaactttgatttatttagagagtgtcatatgtttgagaactgccttggcaaggaactgtgctaaacatagagatacacactgcatgcccattgggctcacattaaagggaaaatacgcaataggggtttacctcagtggggtgaggcttgatactttccagatggttgactccaccagtgagctcaatagaaatatcttcagaaaaagatgctcaaatattaaataagcaatgcatatacacaacgccatgatctgctacatttctttacatctgggctgggagtgtctcttgtccctagctgctgatggggtggtcttctctgtcagtgggaggccccattagatttcccattaggaaaattattctggcagggtatgttctagaacattgtccataagtagatgcaggggcttctcttgggggtgaagaagcagagaagagaagaaagcagcaaagaagaaatgttcccttgcgtgtgggagtgaaactgaacatgagagtggtgattgctttttgtagctagggaaaggcccataagcacacagttagaatgcgcgggaagttgatgaagcaaggattctggctttgccctgaaatgagccagccagagcccagagaaccaatgacaggacagaacattatgaaaagggagcaagggtcagccctttgtagatgctttcttgcatctacataggaatcccacacctgtaatccaagcacttgggagtctgagacatcctgttctgcacagttacatctgtctcaaaagtgcaaacactatcaaagtccacagttcaggagttctaggtagtgacagaaacctacccctctgtacatatgtgtatgcacacacacgtgagcacaaatgcactcacatggagaagagtcagtacatggcaatctggaactgatcccctcccccgggaagaggctgggaaggcctcacccaggcccccaaccccaccttgtccctagtgcctgcagcattcccttcagcatttcttcagaggtctccaggctgctcagtcagattttggctgcagttcatagaatgctcaaggccaaagaatactgtcgtggcattggggttttgtcacaggctctgtcggagctggtgaggtgctgtcagctctgtgtgtttacacaatccagttaacttcaaccccaaagaatattttccggataaagaatagaactgagggtcagtatattgtgtgaggaagccagatccagaaagacaaatgtatgtctcctctcataggtggaatctagacaacatgtgtgtgttgggggaggggtgcatgtacacatggatagcacaaagaggaagaagaagggaaggatcaggaggggaagagagaaagggagctgacaatagtcacagtacatgacagacttggacaaaaatatcattattaagtcctatcactgaatattcataggttatattcatttaaaaaatgtgttggtgtaatggatttaatgaaatgattatgcattgaattttttttaaattaagacctacttgggattttcttgttttgttttgctttgttttgagacagagtctctcttcatagccctacctggcctggaactcattatgtagactcaagctggccttgaactcacagagctctgcttgcctctgcctcccaagatttggtattaaaggtgtgtccagctaggacctactttgaagcctgttctctgtaagaacagggagatgggtcagtgtcagtcttcgggttgtagcatttgttgtgttaaccaacgggagtgaattaaaaatgggtgatgttaagaaaggcaagaagatttttgttcagaagtgtgcccagtgccacactgtgaaaaagtgaagcaaacttaagactgggccaatctccaaggtctgtgtgggtggaaggcaggtcagacactgtattctctcacacagaagcaaacaagagcaaagatgtcaccaggggagagggtacctggaatatttggagaatcccaggaagtaatccctaaaacaaaaatgatctttgctggaattaagaagggggaaagggagacctaataatatcactgccttatttatgacaaaacgaacacctcagggcttttaatgtgtatcataacttaattcatacaccagaattcagatcatgaatgactaacaatgtttttgtttgacagtcctgatttaagtaaaattgacttgtggtgaagtggatatgatctttttaaaaataacaaaagcaacaacaaagaaccaacagtagttgaaacagaaatctccaggcttaagccctaagctcctgaagccccatgttcaagtccaagtagatacatgctgatttacatgtttaacaaataccttggtggttttcattgggatttgcaatcccagagggctttagtgcaatacccatgccctcttcagagcttcagtgatcagtggttcaggaactgtggactggagcatagatgtaggtgagatttcagagctcctctcagaaggggagggggtgggggttggggggttgttcagcaggttttggggtttagctcgaacttgagttgtcgcatcactagttacctgtgcaactccagacaatgtaattgatgtctctgagagtcaagatatgatttgcatcctaggattattttgaaaattaacaagctaattctgtaagctacttgccatgttacaagcactcagtggattttactttcattattatttttggatgtgcccctatgttaataactggaacacaatgaataaagtgcagttccgtgccatgggtgggacagggtcccaatgtacagagacagatagacacagaccatcgggtaatccatggaattcatagagttccataggaatccacagatgacctgaccttcagcccatcaccattcattgacaagatggctcagtctctttgtccagaggtaacttactctcaggaggtggataggctcggttatagaaattgattccttgaccaggcggtggtggcacatcctttaatcccagcactcaggagctagaggcaggcggatctctgtgagttcgaggccagcctggtctacagagtgagttccaggatagataagactgtttcacagagaaatccgttctataaaaccaaaaaagaaaaagaaaaaggggagagagagagagagagagagagaggctactccccactggccagttgcctgtctgtgtggatcatcttggaccactctctggatgaagaagatggtggggatgggggatgctatgaagcaggagagggaagtgaactgagtgatgagaagaaaaggactgtaactcctgtgctggccacctctagggttctccttgaagagtccttttgatctgagaggaggaagtcagaagagcatgagcataatttaatatcagttctgaacattgtccagactctaataaggccaatacaatctcagttaaaaacagtaatccaattttgctaaagcataacagcattctttattatttggatagtcccattttaaacttctaatccttcttttcagtttttttatcctaaaacaacgtgaaacaccatgaacggctgaaatgaaaatgatgaatcagcacctcatttgcctttgataagaagtctaagtgattttcaagcttggacttttaaaatgaaatacattgcattattatatgcatttgctcagtatccatacagagtgtgcaatcttacagaatttctccaatccctactggtaattaataagtctgttgctttaaaaatgcttctgaaaagaatgaagtcatgcatcaaattaaatcataatgacactacagagtagggatccacaatgttccctacagtatactcgtattttgaaaaagaataagaaaatgttattaagagagaaatttgggttgggaggactggatagtaaagttgcacagcccagtttgcctggcccagagagaaacttctggaacctacagtcccagttcttacatatgtccatgagcatgatccatgttgaaatgttctaaagaggaaatgacagtatactcccatcactagccaagtgctgcagtcaccattctgccatcttgaaagggatctgaggagtaactaacattccaggcaaaaggaagtaaatgaaatagctggaggtttggctgcttgctggttttgctcttggataagccacttggtctctcttcttatttgtaaaatggggatctgtgaagattagatggactgatacatatgagaatacctatattgaggaagtgctcaatagatggtagctgtcactcaatagatggtaactgtcaatagatggtagctgtcactcagtaaatggtaactgtcactcaatagatggtagctatcactcagtagatgatagctgtcactcagttgatggaaagagaagggggaatagatcaatcaaggttcctgcccagtaaaatcctttgggaatggtctcagttgagtttcaaggggctggatgtctatgtcaagccttgaaatcatttagcacctccactttgccctatgagcccctttgaccctattgcccttcttctgcctgcctagccaatcatctcttagaagtgatcctaagccatacaagtggtgtgctgggaaactagctctcccccaagtccctggttcataaagtctgttgcctacagtggtgcaaaccctcccactgtgtggaattcaagccacctgattgttttctgtaagtgtgcctgcatcaagtggctttcttccaagtagtacagtgtgggagagatgagcaattttacagcgagaaaagctgactccctccctcagggggtgttcaaggtttacctcaatagtcatgagtcacactggcatctgtagccttcacaggctatgatgacaatggcaattcgctgatgggatcttcttccccaaaacatatgttcctcaagccagcctgaaaaaaaaaaaaaaaaaaaagcaagaaatctcctttaaggggctttatataaaacactgaccaatactcaaaattacgaagattggggtatggagggatgactcagtggttgagtacactggctgctcttccagaagaccagagttccatttccagtacctacaatgtgactcacaaccatctgtaactccagttccagggaatttgacaccctcttctggcctccacaggcaatgcaccacacatacatgcaaacaaaacacccatagacataataaagaccatcccaaacaagtaaagtctgagaaactgtggcagtctaaagaaaaagaataattacatacaatgagttaccctggatgcaattctggagtagaaaggaacactaagctaaaaactaaggggccaggcagcagtggagcatgccattaatcctagcacttggaggcagagagaggtggatctctctgagttcaaggccagcctaatctacatagcacataccagaaccatcagagctacatagagagaccctatctcaaaacaaaagagcaacaaaagaatcaaccaaataacaataacaacaaactgtgtgggagggagacccagcgacagtgttggggaagacactgaaagaaaacaatgtttaaaatttataatgatacactcacatgcaaatatgcgatgctatgatgaaactcattactttgtatcctaatgtaaagggattttttttaaagaataatgtatggatatcggtttatcaaatgtaacatataccaggtaaatgtgaaatgttaacaatgggaaactgtggaacacatggaaattgatttactatcttttcaatttttctatgaatctaaaactattctaaaataaaagattgatgtctaaaaaaaattctgaatatgtaacagtggaagtggaccccctggggccagtatggtgggatccagctccatccagtactgagcttatctcaacagaaacttgaggccctgtgggggtggagcataagatttgctcaactgtgcatcctgcggctggaagcaactgaggatgctgatggagtgtctacactcagacacgtagaaacagcctcgctctgcagcttcctagctgtgtggtcttgatcgacctccccacccacgtcttagtttctcagaccataaaatgggtgtgctaagacatcttcatataggtttcaggctttgggagaggtgacaccagtgagtctgagtaagcgctatgaacagcactggccacacagttctgcttatttcttactagtccttccctgcccttacttagctgctaaggcttagctgaagtgttcaccccctctaaagaacctgcatccagctggtgacagaacttcagtccaccttagctccccctaaacatgtgttacgctctggaaccctcctcctcccctctaagcagtgtatagttcctggctgttctcttctggacatctttgagcctgcaatctgccagctcccctttcgtttcctttgaaagcaccattctgcatgaattggtgagaactgcagcacaaacccaccactgttgactcaggaactcaaatatttagacttcgaaaggacgtgcaactttctctgctgtttccctttattagccgtctcagaagggtgggagataaataaagaaccccacagaagactggggtcccaaagcagcagctgtaggaactgaggcgagccagaaattcaatatgtttagggctcccttgtgaaaacacaaaaacaaaaataagaatgcctcccactgctccaacatcgcctttcctgtggatgccccccaaccattctctttgaaaacaaatgggaaaagccaactgttgatgacagtcactgggggcgtaggggatgtccctggtgtagaggaggcatgcttgttcacaaaagaggaattctgccttgactgacaagcccctacaaacaaaaggcacaaatgtgtgtgtgtgtgtgtgtgtgtgtgtgtgtgtgtgtgtgtacacttacgcgcatgccccacacactaatgggtgaactggaggcagagctcaacaaaagtctggatttgatttgtaggactgtgaattgtcttgaatgttttgaggaaagtttaaggatttgggagctatttgagaattagaagttttatttgaggggcatttgcggattaggagctggttatttgggaaacattaaggaccaactttattctcagctgtttctataaaatccctttgttttgaagtctgaagttctttcaaagagaagtttgctcctgagatttgagacctgcgatgagtaaagccttaaagatggaaaagaaaatgacaagggaagactccgcctccacctgcaccctgcttgatgttctgctctaccaggcacacgtgactctccaatatttcaagattccacatgccatatggcgattttaagttgacagactgatttatagacctgtgattgctaaggagtttgtaaatcttacctgtgtgtgtacttccttttcatgggttgcttatgtggttttcacatgcatattttgtgaggttggtttgtttgtcttagaaatttagaagtataatatttttgattgaggacctcatgtatctgaggttggcttcagactcaccatatagaagaggatgactttgaacttcttgttttttttaagactacttatcttttatgtatatgcatcataaattcatgaagtgcccaagaaggccaaaataaggcattggatcccctggaactggatttataataagcagttgtgagttgttatgtgagtactggaaattgaacccagatcttctgaaagagcagccagtgctcttacccactgagccatctctccagccccagtcttaaacttccaaacttccttttcccaactccagaatgctagaattataggcatgtgccatcacacgtggtttatttggggtaggcaaacactctatcagccaagatgactgataagtttctaaacttagcattcttagctcttgttagactcaatactatatattttgacaatctatggtatgtagtttgtttactataattgccaaattgaatcctactgtacgcatacaccagaagctatttttccactctgagggagccctctgtagggttacacatattaactctatttctagtcaggatcaagtaagcaccctcgttctgcaaatgtatgtcaccacaccttttcatttccattgttttttttttcagaactgcagactttttagtagaattaaattcattcattctctctgtatgattctttcaattgcttcaaagcagataacatatttgacttccaaggagctaagtattcattcctgtttccacatttttgtgttccttttaccttaattctttaacacttaacaccaaaaggagaacagtgggaacacacatggtttcccctataatttgtaatcagttttcaaaagggtttgttctgttacaccagtctgtggtttttaaccccccttttacattctgaggcatgctaagatttatttgggaatgttttgttctgtttaattgatagctgcaacaagtctttctctgtcccacaagccaggtcccaaataatgatcaggagacttcttattaattatgactgctcattctataccttaggcttgttcctaaccagctcttataaacttaaattaacccatttagattaacttccattctatcatcttccatcttgtacctcctgattcctctctgtgtcccctagagtctccctctcacatagattcctcctcctcttccttctctccctggaaatcctgtctataccttctgcctagccattggccattccgtttttttattacaccagttacagcaacacaccttcacacagtatacaaatatcccacagcacataattatgtgtagtattccttcaatatttgaatcttattttcattatcattgtttcagcaatatatgtccatagctcctctttttaaatgtgatttgagcaggttgtggtggcgcacatctttgatcccagcactcaggaagcagaggtaagcagctctatgtgagttatgagtttgagtccagcctggtctacatattgagttctagactagccagggctacatagaaggattctgtctctaaataaataatcaaacaaataaaaattatttaaatttcttaccaatttatgtttttatcaattttatttcaatttcattggctgggaagtggtggtacatgcctttaatcccagcacccgggaggcagaggcaagtggcagatctctgtgagttcctagaattagttctagaccagccaaagctacacaaagaaactggaaaaaaagaaatttcctagagcatcagaaaaatttgtgttgtatttctaactagggttgtgctaaaactatatattaatcttgggataattgaaattctgttgacacttcttcaaagtagtctcttgtttcttttgtcttttcttggtgcataatcatctaccaaaaatgatattttgactgattatgtgcaatatttatttatctcattttaatttcttctcttgtagtatctaaaatgtctcaataatctcaacataactgaggtcaatgttgtagattttcaagttaatgtattgaatgcatctacaaataattttaggtattagctcaaggaaatatccttctcttcagttctctctgtaggtttggacttggagatgtgttaagatgatcatagtctctcttagtgacactaatgtacagttgggggaggtagggatgtaactggtagagttcatgttcaacatgcacaagaccctggcaccagtccaagatgaaacaaatacacacacctttatatttctcccttcatgtatctaagttgtaatttcccttattctatataatgtaattgtctcttataatcaacatatagtgttgacttctgtctttctacctgacttgctttgttttgctttgtttcaatgttgagggtggaacctaaggcttaacacatgctagacaagccctttaccactgcactgaaccccagctctccttctccagtttttacgttttctttctcaccttttttattgaattaaaatataattacctcattctccacccccccagctccctttcaaatccatggcctcttattctttcgttattgtgtgtaactttcctgtcatttctagaagacagtcttgcagcagacttcctggtcttctggctcttacatctttctgcccctccttctaggatgttccctgagacttgggttgtagatttttaattggaaaattcagtcattctctgcatttttgactagctgtggctttctgaagtggtctctatctgctgaaaaaactattttgatgagtggtgagagctacgtttgcctatgagtatcaggataagtgttagggtatagttaggtggaattatactggtttaggaaaatggcactagtcggttctccacggagatctacatggccttactaaccatgaatgataagctaggtttgtggtagttggcatgatttcccttctgttaaatggaccttaaattcaaagagacagctgttagttaccaccaagctataagcactactatcacaggttcagggatcttgccatgcaggttattgttgtggttcattgggtcacaactggtaggacaatcaaatgcattcctctcttggcactttgcatagcactttctgctactgtgaaaactattgctcaggaaggaagcttttttgggtcagatcccgttggattcctggaagtcttgtatctgaagtgcgtggtgtctccatcgatagggacttaccttcagtttggggagtccccaaaccaacaacttgagagaagatttcttaagcctattgctgggatttttgttagtctattgctcttgagaggagcattatgttgccaaatagcataacttcatttaaactatacacatatgtatacgtagacactcatgtatgatgtgtaattttaggtaactgtgaaataatatgatacagttttgtcatttgtatttattggtcttggtgtcagaattgtgcttcatagactattcgggccagcactgatacacttggagggacattgtcagtgtgaacacttgattgtctattgtaatgacttgacttattggtgagttggggtaaagcaggtccatggttattggcctcctcctggaagccagcctgcccacagagaacatgctttccaacttagaactcaaccatacattttacagggtacctccatatggggagcatgtggtaattccgtgctgtctgtggcagagagcatgggtaattctaactaagcttcagttttgagaaacccatggttgccacacatccaagccacatcctcaaatcctgcgtttattagctataaaactgttccttttatttccatctgtctaatttccttgcctaacaaactcaattaattttgactttcagtgcaggggaagggtgtctgttaggctccttcaaacaccagtaatgtgacatacactcaaaacagacaccaaagccaggaaaaaaatcatggccggacagtgagatggcttagcaggtaaagatacctgatgacaaatttgatcccagagaaggagagaaccaacttctaaaagttacctattgatttacacacacacacacacacacacacacacacacacacacacacacacacaattttaaaaatatctgttatgtgtactctttcctgccagctgcctgggtcccgccaccacttcagcccccaaataacacacgagacactatattaattataaagctgttggccactgactagagcttcttattggctagctctgtcttaattactaatctatttctataaaactaaatatttccacatggtcttatcttaccggagaaaaggtccaggcctcttactccattgtggtctacattgcgtctccctgtgcctatacttcccagaatcctcctcatctcctagacccatctatcttacttccctattggccaacagtgctttactcatcaaccaataggagaaacatatttacagaatgacatctcccttcaaaaacctaataaaacctttaaaaatagatagtgggaaaacaatattcaaagacaatggaaggcaatggtcatatgactgtgaacatactaaaactattggtatgaatagtatttgcttgaaatttatggaacgtgacaaacatctcagtaaaaatggtgaggaaggaggcagggtgggataatgaccaaccatcttaacttaatcagcaaggcccagtgaagtgagaatcactgccccaaaaatcaaagtagacaatacctgaggagtgacacctgaggtcaatctctggcctacacacacacacacacacacacacacacacacacacacacacacacacaagtttttgtacaaacaagataacagatttaaaacctttcaaaaataataaaaggcagtaattgtttcaaaaattagtgtgtttcaaaatgaagacatctccaggtgcatcatagtgaaagaggatgaccaattcttaaaagctaccaaaaagaaagatagatgaaccggggggaaaaggatgatcatgttagcaaacttcttcatggtgcaatagaagctagaagacaatgggacaatatctgtaatagattgacaaccaaccctaacctcagataaactattgtgccaaaagccagcatgaaagaaagacttctcaatatcattattacctcaacactgaatgccttagtttagaatgacgggaataataatagcagaaatacatgaaagagatagactgaaatttctttcaatctatttaacagactgaaatttctttcactttaaatagtaggaaagaaatagactgaaagtcaccaaagacaaaactagattctttgaaaaggctaataatgggcaaacttctttgaacatgactcaaaaaagtagaaaaaagttggagagatggcatagaagataaggatgcttgtacaggactggggttgggttctcagcatccatgtggtgtctcacaacagcctgttactccagttccaaaagatctgacattctttctggactccatgagtactgcatacttgtggtgcacatagatacaaggagataaaacactcagacacataaaataaaaacactttataaagacacaagttatgcaattgcagaaactgagaataaaaatggagtaaacacaaatataaagaaaagattttgaaactgtgcaataattttaataagttatgtcactaaatttgaagactacaagatgataatcccaggaaaaatgatatccaaaacaacaggtgacattaagcatccaaatagcttattaaacattaaagatttggcctgggcaatagaggctcatgcctttaatcccagcacctgggaggcagaggcaagtggctctctgtgagtgcaaggccagcctggtctacagaatgggtaccaagacagctaggactgttacacagagaaaccctgtcttgaaaaaccaaacaaaaattaaagaagtgaatgttcatctggaagccccaaaaccactgaaagattggttttctaaattctacacaaattgctccaaagacaagagggggagtcccaagttgttttatctcttggttcctgggctctcgctcccatttcttggatgttttagctcctgcctcactatgcttcattccactattttctcctaaatcctggtgtgcccaagacattagacgcccttctaatgggagccccccacaacttccattttatccattcattcactggacatcacctcttaccttcccctgtctctctttctagtactctgaattctgtaagcattctgacctatcagaaccctcatttcattcatcccactactacattacccatcatgcccagggctctcctctgctctcacttggaattcctcttgaattcctcaatatctctgtccctttccccttaatcataggctcctgaccagaccatgattgcatttaaatccaaatttccatattttttgagcctgtagaagaaaatcacagagccaggctcaccagctgactttaagggtcagatgctgtaagttgtctctctgcttattctactgtgtgctgtggaatgctgaaggttactcctccgaactgcatgctgggaagctcgaaccatccttacttccctacactctgctcagcctctgataaccactgttggactctggaagatcaacatttagcttccatatatgtcaataacaatgtgaagtatttggctgtgcctgatttatttctcttgttcaactcacttctcttaccatttccacccaatttcttttctagtattaaattcattttatttacatttttaattttactttctgtatgtgagagcgtatgcatgcatgtggaagtcagaggataacttgctggagttggtgctctccttccatcatgtaggttcggggaattgaacccaggtcatcagacttggcagcaagcaccttcacactttaagccatttggcagggccacttgctaatctttatgtcaaaattccttgaaagaaatgtctacactcttcagtgttctgttccactcattttgcctgtgaggaagatccccctcaacccctcacttcaagttccttcaaatggctccctttcaattgacttgtagctggtgtctcagcagtactgaagcataggtggtcactccctgctcctgaacacccttctttcttgacttccaggacactagaccatcttggtgccctgtccccttggctggaacatctcctttctgagttctcagagtaccaccagttctctgctctttatccttcctccatttgtaatcattgtttctgttctgtcttaggcactcatgacttcacatggctagtaatggatatgcaacaattatcaaatttccatctccagcccacacctccatctaccttgtgctccagactcacggatccaactgcctagtaggcatctctacttggttagccaacagagacctccaatttgacatgtcccaaactgagctcccagcctttccccacaaattccactctgcatttccccatcccaatagagtagcatcactctttttctcctatgttccatatcctgttcattaagaaattaaaaaaaaaaaaacatgggctggagagatggctcagaggttaagagcacctactgctcttccagaggtcatgagttcaattcccagaaaccacatggtggctcccaaccatctgttatgagatctggtgccctcttctgatgtgcagatatatatggaagcagaatgttgtatacataataaataaataaaatctaaaaaaaatagaaatttaaaaacatggccaaacccagaccttttaccactatttttatttgttgtgcttttctctaagtttctgtttatggactggaccccagcaatagcctcatgactaatctccctgtctccctttcctatctgcaaatgagatcccttattactaatatttaagtgagaatacaaaataatgtatttcattatgacatttccatacatatatgccatttactttgccagagagcctttaaagtgagtcaaggcatgctagtcctctactcaaacctccataactcacgggatagaaggctcttagcaccccctcttcagcccccgtacttcactttcccattcaagtctagtttcaacaatgatctcttccttgtccatcacttcattccatccacactaaccaagcagtgcactgggtaaccagagccatggctgtttcctctacttgtgccattacttgtgtgggtagttatccaaaggtcatctaaggctggtctttagtaaacttccaattctttatcaccaaaccctagttttatttttacctatactatggtttgaacatatatatccccctaactcattcactgaaatgtagtccacaaatgtactcacatggtatttggaggtgaggccttcaggaagggcctctagatgaagccctcaaatatcattagtggctttataaaaagaggaggagaaactcacactagcatgcttgatccatcttgccgagtgattcttttgccgtgttacaatacagcaggaagaccttcacaagatgctgagcaacaccaagttccagggcctcttagcttctagactatgaagctaagagttcactaaactcttagttgtagtgatctcaggtattataacaacacaaaacaggctaagacaattcatatgccacatatttcatccatggaaagtatgcaattcaacagttgttagtatattcactggattgtgtacccatgaacacaatcaattttagaatattttattgtttctaaaagaaacccctttgtaaacagatactcccgtttcttcttgattcccctctctccagccctgagcaaactgttcagctgttcctgtatttgacagctccacatacaggagcacagccatgtctttgacacagtgatttcaattcctttagaaatatccccagaaacgggttggttggatatcatcgtaactgacagatacggagcattttcatgtatgtgttgcccaatcgtttgtatatctttggaaaattcaggtcatttgaccatcttttagactgtgttacttgttttcttgtcattgagtactttgcatttcttgtacattttgagtatcattcccttatctgatgatttataaatatttctcatcacttgatggcttaccccttcactggtacagattttctttactattcagaagctcttcagtctgatacaactcttgcctgttttggcggtccattgcctgagagatgcaaaattttaaacattattatttaaatagaataaaaatacaaaaaaaaaatttcttaaagataacacaagtggacaggagacgaaggaagatcagaggcactggggggaggaggaggtacatattacccagcagtgtaaaaatgtaaaagaaaaagccgtaactgaattttgcttcctacagggtctaccaaaggtcagcaactcaaagcaaacaaacctccatcaaggaactagtttatccttctgggagctgtcaggcaaaatgggtgcctgttcaacaccaggtttggttataatttagaccagctcatggcaggcatgactggttagagtcccaagaagaaaataaacaggaaggaatggttggagcaccaatgtcctcaaggcctaatgccctgtaagactctagttatgtaggcagtaggtggtggccagggccaagtcctgagtgggggaactatagagtcgggaggtcagctctcccacaagcccctccatttccagcaggaagcacaattccaccactgtggctctcccaagggagaacaaacagagcaggcacaaggcaaaaggctgggttccagtgatgagtaatggagagggctgaaattatgtatcaagatgtctaactacagaaaacatgcagcacaccctgctaaatgtacaagagggagcatcaagtgacagagacaatgttgtcatcagtcttacatattcagcattaaaaacactctattggggctctgcagttaagagtacttgtcttccttgcagaggacacccaggtttgattcccaacatcccacatggtggctcaaaaccatctgtaactctaattccaggggatcctaagcattcttctgagctctgtgtgccctggcacacacatggtgcatactcatacacactgtgtgtgtgttatgcatacacacacatttaaagtacttcgtttttctcaagggtagattatttgtctaatctctgtagaacttcttgaggccctggaggacgtttttcatctcttgtcccaattttgcctctcggaacactgtatgcaagcccggagctgcaaaggacaaattgatcctttgtaaattacaattggagtggattctctgaatagactttgaccagcacgaatccacctccacacagtcctccaaccctagccctctgtcatgagctgacagccgctcctaaaaagatcaggagattcaccaggatgtgtgaactcatacagctcacagcacattttaaccctgcagttcgcctctgactcctctgacctttggtaggggttgggggaagaaacctcccttcctttctcctatcatcccaccctgtcacctccgttttcttctaaacacatgtcgggagagaaacgttcttcatttgaggcgtgctttccttggcctgagcttgctcctgtgtggggagacctgaagggagaggggtttctcgggcacctacaaaaccagtcctcctggggtaacgcacagagagaaactcagtccagagaaggtggtatgcagctctggtaaggctgggctgctcactgtgggcagtcctgaactgatgaagggaaaagagatggagttggggggagggcgggaggaggaggagggggcggccccgagcaattcaatggcgctttgatttaacaactccaagctctttgaaaacattttgccaggaaaagcttgccatcaacacgtataatctcttatcagaggcccctgaaagccagggcctcggggttaattcccccatcgcaatgagtttgaatcagctctaaacccgcagtgacatgaaagcgcccgggcctcgggccgcacagaacccactgagaaccgccggccggggaggattacggggcctgttgcacggcgggctcgcccgcaggacgggcaggctcaaaagaaaaagaataattagggataattgcttgtgtccaaacacaagcattaaggccccctgttcccctttgggactttgtgagccagaatgaaagagacaccccctgttttgacagctggaccnnnnnnnnnnnnnnnnnnnnnnnnnnnnnnnnnnnnnnnnnnnnnnnnnnnnnnnnnnnnnnnnnnnnnnnnnnnnnnnnnnnnnnnnnnnnnnnnnnnnnnnnnnnnnnnnnnnnnnnnnnnnnnnnnnnnnnnnnnnnnnnnnnnnnnnnnnnnnnnnnnnntaccactgcgcgaccaggcccagtgtccggtgctgcgacctgtggtggcacagggactacgggactcagaagtttcccggggctgcagatcgggctatgacactgctcaagttcacacgcccagcagcacggagtctccaccaacacccacacacgggaatataggatcccacctcgctcggcgtggggcggcctgcgccacatttggagacacccaaggcacagggtggtcccagccacatctggatgcgttcttaaagctgaggcccgcgtaggaggcttctgttcgtggctcggaagcccgagagagcattaaacacaaacagggaaccgagttagcgttcactcactacgtggggactctccaacaccaccctcagggtgctggggctgggatcaggctttcccgagagaacactgcacagccaaggccaggggaagccagcttccggcttcagaatgttctagtgcccgaggccaagacaggccctgagaggtcctccaaagaagacaagagtggggagaaatggggctggtgccagaggaaggaacctgaaagaacagtggtgtgcgaagaccaccctgagcacctggaccacccagactgcagcctggacctaaaaaggttcaagaccggcatagtacacaggcctaaagatctggaacgtggagcggaccttgcagaaagtcaaaatgcgggcagtagccaggcggctcattgtcagggtccacagccacgccaatcctaagaaacgatccaattctcccttccaaatacccaccatagtgaggctggaggatgcgtggggaagggcttcgtggacgcatggccatgagtgattaattaaagaaaaaccacatccggaaaaaaaaaaattttctgaaaggagctgagtcctagaagggctccggtccctgcggctgcagctgtggcccagacagatcagccagctgactcggagcccaccccactccagtctgcggaggggacccgcttggctttctggcttctaataaactcacggtttccgatttttccagtaaggtctgggactgggtggagaggtgactggggtgacccctgagcctgccactggctacctacgaatatcagatccctgtcattgcactggcagtattggggggtcagcacaatgtagccaaggtttgactctgtactgagctaaggcagcttgcattccccagatgagaccccatagtcaagacaaggatgtgaaattgaaaggtttagacccaggcaaatgcctcttgtcttgccttttttcacccctttagtcccacccgcgtggtttaagggggaaaaaaaaccaaggagggcaacatagtcaccaaaaatagaaagaaaatcgtattttctgaatatctcttttcattgttctaattgccagcatttattaaaatacattcagcctgttggaaattaaaatacagtatgaagtgtataattacagatggagtttttaattttctctttcttttgctttggtcctactttttacatgataggttcctggtttctttagaataataattgggaagacccgagagaagaaaaggcctgcttctaaatgaggaaacatgtagcatgtctgccacataagggggggggtgtcgcctccttccagaaagaatacagttcgggaaattatatattgcttattttcaaagtcatgggccgtttccttgtagagaaatgggtggcactaactgaaactgcacacagggacacgcttctcgggttagctcatgtttagagacaatcaatgctctatttatttgttctgggaggcaggggtggacagaagaatatcctgatgacagcaagggaccttctctcttctcctggactccactccccaccccaaccccagctgctttaatcaggcttccctaaagagagggctttggtttggggtttgggtttgttttgtttctgagatttaatactacatatatttcatcacgccacactggcttcaacaacttttaaaagccatggaattgaacatttaatttcagagtgttggccaactgttgaaaatgtaatattcatttcaagagctttggctaagagatggaattatttattatgacataatggtagtgctgtgtgtgtgtgtgtgagagagagagagagagagagagagacagagaaagagagcacattaaacagcaagaatgcccatagaatctataccaaatcagaattataacattttttgctgaaactgctgtgtgggccagttctcatgagcccaacccaaaagggacttgtgaaaatgatgtaagatgtctgaattcatgccctgcaaaaaaacccagcttggtttgccagggttactccatagatacacgccagtacactgcaccccaaatagacctgtaaccaaggcattctgggtaggagtgcacttcccaggatagatcttaggatgtgtcaaaggaggtgggttccctctaaatgcaatcattccaaaactgcagtcatttcaaaatttctaggattgtaagtgaggaatggcaaagtcaagcatcatgaattttgcgatgtattagcttggagttttaaactgttggtttgtctctttcctttggttttgtttttttaagctggggtggaggtatctcacaggctggcctggaacttgtgattcttttgcttctgcctcccaagtgctgatttcaggactgtgccaccttgccctgctcagaaaaagatatcgatttgctctgcacatagagctaggagagcactaacctgccccattggcaatttggaaacctgctagttctagaaggagtagagacctcttagcaactgaatcaaaggcactaggcttaattacaactgtctctgggagctaaggaaaggttctccccttccgaggccnnnnnnnnnnnnnnnnnnnnnnnnnnnnnnnnnnnnnnnnnnnnnnnnnnnnnnnnnnnnnnnnnnnnnnnnnnnnnnnnnnnnnnnnnnnnnnnnnnnnnnnnnnnnnnnnnnnnnatatatctataaatgaaacaaatatctatgtgtatagagatagatgcagatgtatgtgtgaaatatgtactatagttttaaatttgcattttaaaatgctgcaaaaagttttgttttttttttttatcatgactgcacatgcctaaactgaccatgtctggtatccttaaaatgctaactaaaatgcttcttgcttttcattcttttaggacctccaaggcaagagcaaacattactgcagagtgaagccactctatatgtgtaaagacgacagacataaattacatccacagtggaatgttggaaattcatttccgcctttgtggaacctgactttggggcacgggagtttcctccttttggaggggcctctaggcagagcctgggcttggcaccaaaagcattgcctggttctgtagaacactaaatctggacagatttacacagaacagaagcgttcctttccccctttgcattccagccaagcagcttggggactttcctgcgttccagctccttctgagtgtttttccaggtttgtggctaagcccaggacagagaagaccatgttacacaacacggtaatgagatctgtgtcatcttgtatttttttaagctgtgtcctgatttttttggggggggtggtggcacaggcattgtctcttaaagatgtggctgctatgacattgatgaacagtgtgtgtctgtatgataaaataaaaatcctgaaataggtttacatgtcgggaagacagattgttttctttgtagtcctctacttgaatctgtcttcacatttgttttacctttttataaacaatgtttttgtaaggacaaaagttcataaagaaggttctgggaccatttttccagacaccatatgaatgaaacaaatgtctccccatttgacaggcgtggtgctttctctaactttaaataaatgactactgcttacattggtgggaagaccactcggaaagtggctctactgtgttttcctcaaatgaaacttgagaactctctaacaggactgctccgagtatgagtggcatctaaatgtttttatagagaggtagccttttctctgctgggtcctgggcatgctggctacacagctagacctccatagtgattataatttcacatcaatacaactcagaacacaggctgtgagaaaagatacaagtcaaatacacagtcccattctgtcaaagcgaaggtcatcaatttgacaatcaagtttcttgctgaaaccattcacagctaatgaaataactgatggcatttctcccacattaattttatcatgtatttgaagcttggtgtaacctgacatgtcccaatacttctgtagtcttctcgaaagcaatagaaaagcctggaagcatggagggaaccttgatagcaaccttccccacaagccctgcctgtggagaaagagtatagcatacaatgtactcggttaaacaaatatttaacttattcctcatccaaggcaaatcagcttccagggcaacatatgggctccaattcaggggtagagcacatggttcaagtcaggaccaggagtgactgatgtatacagtcatggacaatggctgtggatggtccaggcagatttgggggtcaaggagagtggggggactgaactttgctttactctagtatgcattccagattagagctctttgccgtagccccccttactgatctagaatcagaaggtaacattttagcccaagttcctttttaacatagagctgacaaatactattgccgggtctaaggtcaaaatcctgactcgcaggacctcaccagaccacaaaggtcacttgccaagagtccacccagtcaggaagatgagttgaagaggtgaaccaagaaagaaagttattcagtatggctatactggaaagaaatggggcacatgtgtcctgaggcctgtcttcgaggagctaccaagatctttggggctatatgaagcaaagcacaaaagctgagagaataagtaaagatccatagtcaagaggttttggtcaattgtaatatggttggtcatcagctcaggtctggttctctgggcttcactggtaccaaagaaattggttcctgtcatagcgggtaagcctgcagggctcaatcttcctggaacttaagggaatccatgagggatccactgagggaatatgtcagaggagcaagcttgagcagatcaggacaaggactggatcctccatgtgggaacagggccatactgaaggcccccactactctccgctttcctgactttgagctatccatctccagtactgtgcctatgtgtgaccaacactcctcctgtgtgacaggccatgcagatggcttaagctcacagtgcagatttccttagggcctgtggtcttcaggtggctgtgagagatcttgagctctgctgttctctagtaactacttgtcacccatggctattgatgtttggctggtctagaaattcatctgtgctatgagtgtaaaatggaacttgtgtcctgttttaaactgtggaatcttctcatgtattaccataggctgggtggcttagtcacaaacatttactctcacaaacctgaggttcagaagtctaagaatagcatgccagaatacaaggacactattgtcatcttgggggccctgccactctgcctctgtctaaaattaactgcctccaaatgactcactcccaaacaccattgtattggggattagagcttcaacacgtaaactgaaatgggtgaagggaaacaatgaccataacaaaaactgtatgaaaaattataaagtatgtcaatggtgtaataatttcttgattattgagttaggtaaaatattttatctaagaggtctccattgaatataacctcttggcatttgtgccacatggaacttctctcctaaaatttccttatttatttttcaaattgcttattatttatttttataattttgagattgagtctcaaactcaccatgtagctcaggctggcttcaaacacatagcaaccctctggtctcagtctatcgagtgctgagccaccacccctggaccatatagtagttcagttttagtatagaacaaagctcatgttatagactgtcgcttccaagctcagatggtaaggagaccacagctgccatcttgggtgttatttctttcagtctaacctcatttcttctctatttcttttttatcttagatcccagtcactcaggataggatgccatgctgaaggtgccagacagagaggacattgctctggtttgccacctgaacgtttgtgtactggagtcttgagccccagtgtatcaccacaaagtcatggtgtctttaagagagataattaggtcaaggaggcattgtcctcagaagggactaatgcctgcctgtcccattggtgtggactctgtctcaagggactagattggttacagaaagggtgacaatgaagtaaacttggctgtcttggttcatcactctctgtcaccctcccaactttcctctcatttccccgacaatattgagatgcagccagtagacctttgtcagatgctaatgccctgtatctgagctattacagctgtcacattagaagacaaaaaccctcttttccttatatgtcatattgtgtctggtgttttcttgcagcaacacaaaatccactaggacaaaaaggatgagaggccatgtggaagacaaaggaggcacattagtcaacagccagcaacagtggtatgtcatgggagtgagacttcacacaagtgagggaggattttgcaaaaggactatcctacttctgtcagcactgacaaaggctgtcactaaacccacagtatgactgtagactcaggagaacctggagccaggactattcagctaagccacttgcatgctgctaaccccacaggcaaacaatgaaggctttttgttgttgttttggggttttgtggttttcttgtttgttttgttttgttttttgtttgttttttgagataggatttctctgagtagctttgtagaccaggttggcctcaaactcacagagatctgcctgcctctgcctcctgagggctgggactaaaggtgtgtgccaccaccacccagctaacaatgaaggttttatagggaagttttgaaataaattgttatagcaacaaataaggaacactatctctaaagttgattttggatcacttctgagccttttggccaaggtcaagtgtagaactgattttgcctgttaacttgtcatttttaaaaatgtggctataagaaagttttaatgtccatggctgtcccacagtgtatacctctattgggcagcactagtatccatggtttagatggtaactaagtgacccaggcttaatctgggattatagggagctggtctcaattttacaacacaatcaatcaaacaataaatcaaaatatttagctacaaatctaacaatgtatgttagaatgtgtcattggtgacaaattatacagctgtggattgacagtcaagagataccgaatttcataagtaatccacagttaggaggaaatggtacccagaaagatctctttatctcttttctttttttcagtgatggaaatggagtgcaggaccttgcacaagctagacaagtaccacaccataaaactaatccttagtcccagatgcccagcgtttctcatccagcattttttgattgattcagcacttactcactgtcgggggggggggggttatgttgttccttttgagataaacttcatgttagtgaggccccaacacaaaaatgcccccttacaaacagggataagtgcatctgagtgaagagggaacaacctgaaacccaggaattttccagcatgcccagaatggttccccacctgtcctgctgcccccccccccagcactctgttgagcactggcatggctgttcttcaacaggctgacgtctcagaactcgagagagccgtgttttcatttagtggcgtatgagctacctttgaagttgggaagaaatgaaggacttcactttctatttatttgtatttgcagaaccacagagatccaaggtgataattagaaaaatattttagaaaaccatattctattggatttttgtttttctagtacagtgacaagttctggtaagttttcagtggtgaaacagatcagatctccatcatttgatgtgagaactgctggcccaggcctcctttgctctggttatttatagattaccatgaataggctgtttcacaaaagcaaacactgtctttcattttttttcctgagatttaattcaaaagttctcttcttcatatatcttaaatgcattttagtttgacaacataattgcagatatagcccattcctcttcaaagtggggtgacttctatggcaacatttagtcaagagtagacagttcactaaaaggtcacaattgatagttttaatctttcaaaaatggctcttgataaagctgtagaaagcattccagcatggacatgtcatgtgattaacactggctaactttccctaagtgttagtacatagaagatgctctgacatttgtatcaaaaagctaactagctgatccttgatacatatctttaatcccagctcttataatgctgtggtaggcaggtctctgtgagtcttcatctacttagtgaattccaggccagtcagggctacacagtgagaccctgtctcaaaacaacaccagacatctaatctaaattaacattatttcagaaggctatatttattattttattacatgatttttttgagacagggttgctgtgtataaaaaccctggctgttttggaacttgctttgttccaggctggactggaactcacagagatccacctgcctctgcctcccaggtgctgggatcaaaggcgtgggccaccatgtcggacatatttctattgtctttagtttcaaatcctttcaaactaatattccaggtgacatcaagtcttttctatgactccagagacttggattaaaggagggtgcacgctgatctgtttcaagtggacactaccaacacacattacaatctggcttccaacccataccccactgatggctctgatatcttcctgaagccagtaacacatgtcacagtgtagaaagtgcttattaaattaatggtcaaggagtcaaaaagtagatcttcccatttttattctcattttaaaatcaatttccattgctttcccattcaatgttaaggaatatttgcttaaatcttggggagcctctcttttccctgtagcacacattagcaaacacaatgtgtatttttcttttaataaacaaagctatcagtgatgtctgccagtgaaattctgctactttctctggaaaaaaaggatttgctttataaatgttaatgcagaggaacggctctgaaatttcacaaaaagctaaacacataaatagaaaccatcattgtttgagtattcattgttttattgcatttctcttattgcttttcacctcaatactacactctcttagtggactttggatttcccattagacatggcacttagaaaaccctttggaactgaggatgtgaacttatgatgggattttacatcttctgctgctggaatccattcaatccaggtctttactccctcttcaaacctccttctgctttccacctctccttctcattggatgtccatttagtatctactctaccatacacactttaacctttcttcctcagacatcactgtccgtagctcttgcttgtaggtgacccctctaacttcaggggtctctaagaccagcagtcacttctggttgctctacttaaagccacaggattctgtcctttgcaaagatcctgccccttcctcctcagctccccaatagcttgcccattgtgtacagcctcagcaaagaaatgtgccatgagcaaagaggggaaaagagacctcctagggacttacatcagaatcaagatctgtcaccgggatgctccagacatgccacacaatccactaactccagttatacagatcattttccaattctcaacctaattcctgcctcacaaaacatgccttttcaagcaatcagcacaaagtattcctgtggctattattgtgtggttttgagctggtgatgaaggacataaagtactatcagacaaggcctcccctgggcaatttgcctgagtccctgtgtgggtgcagagccctctctttgtttgccattcagtacaagactcctgtggatgactgacaagggcagacttggaacaacattacttcgggaggataatgaccagccatcataaattcctttcttaaatagtttattgcaggttgtagactattgacaatgactttgttttatagcatgaaggaagatgtccttgctgctgtcagtctctaaaacaacattaagagtttttagtacccccagagaaaacagcttttcattaaatgaatcataaatagtgttaaagccatagttacataggccagggaagagaagaagaggaaaagaaatagctgtctcggatgcaaagaggtcctcctggtgcctctttcaagtaaataaaatagtaaggaagcttccagggctgtccttctgtgcctgtcttccctgggcaataaatgaaatcggatgtaaaaaactgtgagagacatcataccaccacacagagaaacaaaaaaggagatagaaatgaggaagatgggaagctattttgttaatccttgtgttcggaccctgtcatctcattaccaattctttttctgtgagagacattaatatctccaacaaaaatctcatgttataaataatgtttatatattgagctttaaataggaaacaacaggttgtcgccatcatcatttgagatccggtgtgactcaactgttactgaaaatgcctgccaggaagtagaaaataattctgtgagtgttttgttagaggagacagttcagatgagtgcgcacatctttattcccccctttcctttaaaaatcttttgtctttctttggaaaaatacattaagccctaagatatcttttttaaggcaagttttacaaagcacacacagagtttgagccacacaagtcatatacatatgtgagtaatcatatttttgatatatctctctgcctaatcattaactttaaatgccaaataagaatttgtaatctaccataaattatttcacaggagtaatttaagagagctgctgaccaatgtgaaacatgccagtccacaagcaattggccgccaaacattggagggggaaaaggtcccagataaaaattaccataaattacaatgactgtaagtctctaacgatcaagtggtggttagagattattgcatttagaagataggaacaaacctattaagcgtcatgacatccatccagagtccattttactcatcaggaagctggatctttcaaaatccccttgaacatcctcacctctcctcacctcacctcacaggatcacatctaaagtgcatcatactagttacagtccattgaacgtagaaaacaggcaggaaatcatttttgaattatgatggactacccaagctctacttttataatgaaaacttcaaaataaaccctcaatttggacttcttgttttctcccttccacatataaaaagcagctgcatgtgagtgaatcaggcagaatggttgacagagtcaaaaaccagaaagggatgcacagccccataagcagcgactatgctcaggtgggaattcacaatgggctgaatttgctatggttattattgtgctcaaagaatccctatgaagtgcaggggaagttataaatctgtttgagaaaattaattcctttttcaaatcttcatcttttccttcaagatgtgtctccaaagaaagacaattacgtcaaagaaggttcgggggcctcattctgcacactgccttttaaacacattctggaggcctattaaacatcatgtaaactgtagacagcaatgcttccaccaccccagcccttcacatctgcacaccagcttcttgggagcagaacggagacatgtacattttagcatatttcaacaacagagtcttgggggctgggaggtgtgtacctttctccatatatggccatcatgaattctacccaagaactcaatacagattatttatataatattcccactcctcacccccacctccaggctggcagagggtgaaggaaacattttgggaaagtctctaccacaactgtcttccaaaatatggatggtgctaattggttctgattttcttttttaccagcacatggggtatgcagggtatttttaaaattaatctttctaaaaaatatcaatgtatacaacaagttgaagttatttacacactaaatttatttatgattgaggactctttaatgaatttactaatttctttggaaaatcccagtatccactcaaattccaggcatagaaaggaagccccatagaataaagtagattctggatggtatttcataaatgacttggggacaatgcccaacatgctcaaactatgccttgatgattaaggagggcaaatgtagtcaataggtagggagacagaatggaaatagattccaaaggaaagataatgtttatatggcaataattatgtttttttcaagagtagaatctgcataattaaacaagaataagggaggtcgttttggtgtagtggccatttaaagaacatattgcaaggacgaaaatgtagtcagaaaagaagctatagtgtgttataaaatattatggcacagggaggaaagggtcattaggcctagatgccacttctgctctattcttagcttctgatctctccatcagaactccactcctacctcatagacactgtgaagatagagcaaagaatagtttaaaatggctctggaaactgttaaccaacatagcaacacagaacccagttaccagcacatacttattgttgtctgtttgtttgcttgttttttgagacagagtttctcatgtaattgccctggctgtcctggcactcggctgtagaccaggctggcctcgaactcacagagttcgtgcctctgcttaccgagtgctgggagtagaggcatgcaccaacacattcttaagcatggtacagagacctggtgggagccctacgttgacagtgcagtgaaaatggtgttgatcctgcactgcgggaacgtagggctcccaccggggctctgtactcaagccctgtctgtctccacaggagcctctgtgtccagaatggtctcaagacagagtaggtgttgctctatgaatcaacctctgcctgttggcttccaatataagatgaaaacaaggcttttctggatacctccagaatcagaatattcccttggagatcagagaagccgcagatcattggtgttgcagggccaacccacctcctacttgggtcattttctcctgcaaaacatactatacttcacccattggtgttgttgtagctctgccccccaggggaggtgagatgctaaagtgttaataattatctggagcagaacatttaacaatctggatctcaggatggaatttaagcctatttagatttactgtgaattctttgaggttaatgcaacttctgaatgtgactagtaatctctaattatttgcggagatggtagatgtgagaccagattaaatccacagataatccccaaatctcattttagccaacagcgaagctcttttcccaccaaccccaaccccagaagaatcaactgaaaaacggcaaggttgacttggtgctcagcttttctttctctgcctaccctctgctagtgcaaaagagtcgcagaattcccaacgggtggagggtggagagagaaagccagcattaataaccggagagtggaaaatcgcagcctgtgccacactgcgctgctggaggagcaggcactgagtaacagaaacgccagaatcctggcataaaaggaacaaaccacaaacacagaccttaggagccctgagaggcagtgtcgtcaaggagtctcactgtccctgctttagacttaggtaccctgagatcattactctcagccccgttgagctagcttcctccagacagggatgggagggagtggaacctggagccgccacttcaggcttctagctccagacaagcccaaccccggctttgagtgatccctctcactaagacacaacatcttatagctaggcccagaggaggaaggcaaggcctttggaaggcaaggctgatgaccccacaacccttgttttcatgttgtctcctcttaaggcttttaaaatctttttcttactcgattgtttattagcatcagaccagtttcatagtctcttcgagccaggtctattttgaaaagacattaatcttacttgaaattccaaaataattatattcagagaggcaaagctttccaaatatcttaaggcggagagtcccgcttccttaaaaggaaaaaaaaaaaaaaacctgcaaaatattttattaaagaattaaatgtccattcgaatgtccacacgatacacaaaggtctcgctgaattctgatcggtatgctttttatttatgttgagcctgccagaccagaacctttggttagctcatgttccaaagctttagaacgcattcgaatcctatagaagaaaaatggagacagtgtggcaaagagaggagaaccggatgaacgggtttttcttggggtggagtgacagagatgtggaaattggtaccaagagctgaaaggagccagcgtggtgggggagggcatcaaatgcattatcaaaagctgactcctgagcttggattctgagccaccagtctcgcggacagggagactcccagatagaggcatgataggcaggagctgggcacctttcttcccagggtaaaatgtcggtctgagggatggagggaccttcctcccggctcagagctataagctccctagcggccacttgcaggaccccggcgtagagtcaccgcaccagcagagctggggagcccaggccagtctcagggtagctggcataggtctagtgacgatcctcgggggactccgggggccaccctccgcctcctggccaccggctccgagccctgctctgcgcccgcgcgccaccacaactggatagacccgcaacctcgggcctctttcctgcccccgcgtggccatccagagaaaacctcgtggctcttgcctgtcacctaaggccactgctactgctgctgccatcccgatgagggacacctaggtcagtgcggaggcgggagtggacaacgtgcaggggaaaaaagaagaactgtcgaggggagtggcgctttttctgagggaccgagaccccgtgggctttgacaggaggatggtcctacatagctggccgtctaaggttgttgaccaggaccaagctagcggtttggacaatcacgtgattactgtgggaggacagtggaggtgcaatacggaggtaggagactgaaatgtcctacagtgggcatagcttcgacccaggtgagccagcctggctgtcctttggcagcttgcagagccttacaaatgactctcatatctggttgcatgtgggtacgtggcttttcctttggccacatcagccctctgggtttcagttgccaaaaactgtgtttactatcctctgtttgtcatacaaggacaaatccaatgtgtctgaagagggttggcttcctgtctttgctgccgcctgaggaataatgcttggggaacaaatatcagatggagacccattccctgcggccatccaggtttctgctggctcaagatcctgagtcaggtaaaaagattggcagtattcaaagctgtgctaatgaactcaactctctagaaatcactggttggttgttgaacaaggtctgtgttttatggaagttctctagagggctttggactatttgttttcaaatctgtttctcagtttccagttcctgaagaaatcctcttcccccagtgagaacaggggaagtcggtttttgttttgttttgttttttgaggatcttagaacaagagtagttggatttatctgtcacttgccagtcctgagacatctattttctatgtggttggctgaaaaccttgagtgagataagggaagttgaacccttggacttgattctggtcccacacttatccctgggtcccagggtcaggatttgcattccaagtctgtttgatttgtcaggtgaactagtcactgatgctcatgtatagatgttgttaaatgccgattctggggacatcttgatgcttgtgtaaggattgccgctcgccagaagttggtgctaattgatgccaggcagttctgcagccaagacttcaggctttcgtgtgttgtgctcttcctataaaggggaaatggttagccaaggcctatggtgagccaggaggaacttcatgttacccaaaaagctaaacaggattgtgattgtccttggacctgtgaggaaagacggcacttggattgattgtccgttttgatgcctaacaggagagtgtttccctttacacaatgccactaaaattgtcatttcccccttccacacagtgtgttgaggttattaggagccccctagggaacagccacttcttgtgtcctgatatatcacattttcatgatttacctccctagagtcttgagccataaaaggttctttggttctccagctgggccttcccaagcaaggataagcaccccattaccctttccttatttaaagttttactaaaacaacaacatccgtgaaaacaaaaagtaaaacaaacaaaaaattaaaataaacaaaagaaagccatctggtgtgtttacaaagcatacatttcttactctaaaataattaaagcctgccaaagattgggctggtcctgcctctggcttacgtgcctgctccatgtcacagctgggaagaagaggattcaccactggactctctagtcctcattggggaggttcctgctaggatagacttcagtttccgtgtgtctctcattccacggcctctgagctacagagagaaggctttgccatcaggccttctgggttccttcctaggtctcttgggcagtcccatgctgtcccccagcagtatccaggaaggttcacagccttacctgttactctgttctcctgcagcaagactaagagtctgggtcccctcctcccagaagcctgccccctcagtatttacccctccctttttcttccctcctgccctccaccacactgctgagaaccacctgttttgtgttgtgaaagcagccccatcctcccctcacagacctcccactgagttccaatttccagtccaaactccacatctgagttcttgactcactggaaaagtataaaaacatcgcagattcggaactgactttcatactggagtcttttcttccagtttgctcctgtctcagaggagtagtctcagataagttctaaacctaagggtggtccccggactcctccaaaatcatggtcatctctgcaggttgccatatggcccataaaccctctcgaatgtcctaagtatgattttacaatcgaaaaccatgactttgttgtgtcaagaactgtataatcacagcctcaagaaaacaggttcacattctcatctgcgtgacaggaaggaccaaattccccgactggcagtttgtgactctcctggtgaagtttatttattgaatattttctttagccttctaccaacatctgttactaggcaagtaggagtgagtgtcaaaggttgggggaaattttttttggaagagtaaagcctttaagttcactacagtctcagataaagtagacaaaacaatggcctcccctgaaggtccactttctaataatggagacgggcgctgttacctttcctggcaaagaaggcttgcagctgtgactatgtcaagggtcttgaaatggggacatttttctgaatgatctgtatagaccccatgtaatcacaagggcctttgtaagtactggagggaggcaggagagtgacagacagaaagatttgaagatgccaaattgctggctttgatgatgaagggcgaggctgtgggccaaggaatgcaggaagcttctaagaagctggaaaagtaaaaaagatggattctccccaagagcctccagcaggaacaggccttgccaacatctcgatttgaatccagcgagacccatttcagactcctgacctccagcactgtgtgctaataaatctgcattactttaagccactgaaggtgtcgttgccttccacagtaagatgtcacagtgtccgctagcttgttgacacacttgagaaaagtacctttcttgttttgaacttgaagggacactggtacagcatggagaataaagctgtgcccccatttattccatcatcccaagttttgccatttgccgactcataactgacatcatcaagaactgtttgagtgaggtactgtgataaactttatatggaggggaaaactgaggcacacaatgtaactaacgtccctgaagctgtgcctcagatccaaacacattctcctcagcgaattccaacattcttctgtgtggtggaactctaccctcctctcagagaacagctcaaatacccagcagcatccccgtacaccccaggaacagtggctcccagtctgacggcctcctttcccggggagtcctccttggaggcagccagcctactgctgcttatagaactgctttaggctgcagtaaggtttctgttgaaagtttctaggccagtggcacattgggaaattattggcaaattggacttctgctcacctaatgcaaaggtctgtgtgtcagttgatagttatccttcacttcaaaggccagggtagggaaacctcagtttgccctgacatggcagaagtccttgtgtttcttcctggaactgccacttccaagggaaatgaatgccctgattcagtgagtgtcagccctggccacccattgcaatcaccacaaaagcttgaggcatcagtcagttgccaggttctaccccaaccaatgaagtctggtgtggcctggacatccagacctgttcagtctccccaagaggtaggtacctactgtggggtgaacaaatgcactgacctagtagtcatagaattggaaaatagtgctagtccccagtgctcctctgaggagagtctgtagaggtgagctttggggtttgggagcacaaaaatcatgaactgttttagtggggaacagcaaaacacacgtctgtggaggtaagcacttgtggttgggggaaggtaccctggtatcagaggtaagagctccgtgtgtgtgtgtgtgtgtgtgtgtgtgtgtgtgtgtgtgtgtgtgtgtgtgagtgtgtgtgtgtgtatccttgagtatgcatgaggctatgcctgcagtggatatgtggggtatgtgtttgtgtgtgtgtgcatgtgtgtatgagagagagagagagagagagagagagagagagagagagagagagaacacctgacaattttgccagcctacaatctccccactgcaatggcctcaaagtccctgtggcctgtgtcacctgggttgacactgaggcatgctggggagcagtccacagaaagtttaccctgctgctcactgagcttcggtagaaattgtacatttatttttctcagtgacagtataattagcttcctctcttgtaagaaatgaaaggcagggcgctgctgacagctgtgggagctgccttcctgcccggatgaatcgagcctccaccaatgctgttacacctgtttaaacaaggaacagaataggtatttatttaaagttcaagaggccatgtgagccacggcctaaatctaggcctggatataattatgaagatacttcatcctttgttctaaaaggttttgcagcccgtggcccctcaaagtcttcagagtaggtacctcccagagcgagaaaaacgtgtgagcatgactgttgaagtggaggtagcagacctgtgatctcacaaggacaccagaatgatgacacccaggccttgctgatcgctggaaccatccatgcggacatgtgataaaggtgccaagaaccagccacctctcctagcaatagtcttgtacttgaaactgggcccaagaatctgcacgcgtgagtgcctgcgctcgcacacacacacacacaaaccttctcttgggctatcaagatggttcagagagtagaggggtttgccgccaaatctaacaccctgagttaaatcccagggacccacgtgtgggaacgagagaactggctacttaacagcaagttgtcttttgatcctcacacacaggctctagcaacagtgccccaccacccccgcccagtaagtaaataagttaaaagaagtcccccagaagagttctaacaatgactccagttttgatccccctgacctaggacctgggccaggagtggaagtgtttctgagaccagggcagggacactaaagcagtaattagcatttactgaacatgcacacaagcaagtaccactcattaagccactaggcacaagcaacaattgggctctttcgttcattcatctgtcatactctgggggacctcagggcaggagttctctgtgtttttgaggtcataggctcatttgagatgaaagaaatctttattaaaccctcttacctgaaaattgcatgtgacagaaatttcccacaatttcagagggtttgtagagctccttaagccctcttaatggcttcagatggagaatgtccatcctggaggacagtcccttgtggtgtccatgcacaacagcctggattggagcttttgagcacttcctgtatgcagaacacatgagaatgtctgcaggcacaaaagggaaagatgaggcaagatagttggaaagaactgacagatgaggaagacgatataaagttcaagggcatttatgtagagatcttaagaacaggaattggcaatgtgctcaggtgccatggactgtggccctagtaggagaactgaaactggggggagccaggctgtgcctgagctcagcacaacagagaggattatgggtaaggagctcagcaaacaacctcttaaagaatatggtacttcgtggagaagaagtaaggcatattcaaagatgagagagagagagagagagagagagagagagagagagagagagcgagagagagagagagcgagagagagagagagagagagagagacagagagacagagagacagagacagagacagagacagaaagacagacagagacagaaagacagacagagacagagacagagacagagtcagagacagtgacagtgacagagacagagaaatagaaggaagaaatatgtgctggttggtttttgtcaccttgacacaaacctagacatatctaggaagagagtatcttaattgagaaagtggtcccataggatcagcctgtaggcaagtttgtagagcattttcttgattcatgattgatgtgagaaggtccagctctatgtgagtagggtcacctcttggctggtggtcttgggttctataagaaagtatgaaaaacagctcctgcctccagattccctccctccctgtttgagctcctgtcctgacttcctcggatgatggactgtgatggactaaataaaacctttccttccaaggttgccttgggacgtgatcttcatcacagcaatagaaccttagtcatgataaaaggtaagggactgagaagatgactcagttgacaaagtgcttcttatacaagacctgagtacttattgtacaggcttgaagactttagtttgtctctggtgtgcacataaaagctaggtgtggcagtgtgggcctgcttacccagcactgaagacactagagacagtctagtggaatcaataagctccaggttcagtgagaccctatctcaaaataatgtggagaactgttggaggaaatatcctatgtagactattgacctacacacacacacacacacacacacacacacacacacacacacacacacacacacatagcatactaatttccagttctgacaggacttaacaaagtggcatgtaacacacttgtccattctcttgtttgcaaatgacaccagaagtctaaacttgcaactatttgtgaaggtgggatttggggcaaacagttctgcacccttctgtttctttgccttatcatatacccaccatacagtggctgtaagtctgcacaggaatttgtgggtctaggtccctcttaagagggaccctaagaattcctccctctatcctgtagggggagcagctgcagttttgaggtctgtctttgagttcttccagggtggagggcagggaataaactctatgctgggagactagccagaaaagaactgtagaggaccagatgcaagtaggtgcttgccaagggccaagggacagcagaccctggtgaaggtctatccagacctaggagccagagagaggaggggtgtgcaagaccatagctttgttggagagtggctgagccaatatgatatagagggtctcacggcacagaaggcactaggcatggtgaatctgcatagtattgaagactaatgccatgaggcggcccactgcccagttggcactgccactctctaagaggtattggattctgagatgtgtctgctcctttgctatgaccaggacctggcactgtgatgtgatgcttgggttactgaaataggcaaggagtttcagcgactcgaggcaagggtccttgcagatacatgaagtgtttcagtaatgggtaacatatgaaagtcaacttagaaaaaaatgtgaacttgtaatggtagatgttggcagaaataggagaaagagctacctagaacggccctggactttttgggactcacaggaactgccacaggaaggcagtgatgaggaagtgtggaatcagatgtaagggtctcctactagtctgggccattagggcatggtcagaactgtgtatcagcactgcctgggagagaaaaagtgatttcttagacaaagagtagtttccttgttcagaatgcaatttctttgcatatcaatgagctgactaaacaaatccagaaattattacaaggtcctagagcccttttaaaacaatggagaacacaccacaaatatgatttcctgtttagatgaagccacacatgaccatgtttcaagagcagcagcaatgtaagttcacttagctctgttcccattcaaaatgacactgctgttttcattcatgaaactctattccaggatttcattctctgctttacacgaatgtcccttagtgcccaaagggatgaggagtttaaattatatgcctttgtattcactggtgaaaagaacccaattccatcctgtctcctctaaattaattagaacacagatggtcccccattctctgtccttgtcacttctgcttggaaatgagagatgtgccctttctggcaccatcctaagtgccatacagtcacgagtcacctaacgacagggatggggatcattctgagatgtatcattaggtgatctcatgactctgcaaacatcatggggtgcacttatataacctaggaggcacaggtcagtcatgagacaagggctcctgatgcaatcaagatgtggtaatcacgaggtgcgtgaagcttctgttaggatagcaaggcttactgctttacagtccactttttaaaatataagtaggactacagattagcaacttaaggtgtagtgcggtggctgggtgtggtggcacacactcctaagcctagaatggtgtgggggtgacagcaaggaagaatttaaggtcatcctctgataaatggaaagttcgaagggctgcatcaacctctgtagcaaactatagcagtgtggccaggaatgggcttgatagcccaggaggatctctgtgagttcgaggccagcctggtctacaaaacaagttccaggacagccaggactgttacacagagcaaccctgtctcaaaaaacaaaaaagaaaaataactttgaggtaacaatattaaactatttagagatgaagaaaccgaggcaggtgcataataaagtcattgagtcagtacatgaccgaaccaaaggcagagtccagagccttcattttgaccactcttgttttgtcattcatgtaaattggtgaaaaaagaaaactagactctgcccccattgcccccagatgaactaagaattgacagagcctttggtatttctcttctgttgaaagcttgcttgtaaatgagacaagaggtaggatctgctgtcactaccataattgccacactaagcatttgaaatggtgtccattgctctgaaaccaagacatgctctcaagtccgtggcactcaggggcacttaaggacacataggggcacttaggagcattgagctgtgagaaacgcaacttcttagaactaacacaggtcctaaagtcaacagattttctttctggtttatgggagcttttgaagaaaggtgtacaggtggcaatcacatcaaggcacaggtaacatctccactggatctccatctcagaaagaggtcaatggtgttttaattatctttccttctgatgtccaactctgtatccaacataggaatagttgatcaacagaggaatagaacagccagtccagaacaaggaagtcaagatgaagcttccagaactaaaggtaacaagaacctcttaaagcccagggtctaggttgacaagagagatttatttaggttccttcctgtagcaagcatgctaaccaatatcttcagcacctctcctttctgggcatgacaataccttctgctttccagaatccttataggcagacacaagcgtgtgactggttatgttcaataaaatgttagtagagacggtgcacattaccaatgagccgagggagtgggtacccagctctcctcctcggatgcagctcccatagaggcctcagactgaggatgtgggagtcactagatgagtgtgacttgaagcactatctgaaggacagatgcttgagagtcacctgaatgtgcaaaggacttcatatgaatgaaaaaataagcaaaacatatgttgtgttgaaacacagagattgaagtggtagtggttgttactgcagcaaaagctagaccacgctgactaataggcatagctgcctaagttttctaggtttcttttgctaggtcaggtaatttaccatcccctaaaagtttgtcaatacaggtgacttttttcttctggagctaagaggtatgtggatctatgacaccatgtagatgtggagtattgtttaacacagctattctgctcttcctctgtttcctttgtaacaaaaaaatgcaaaacaagaccaccatccccagacataaacactccagctcccactacccaggagtcacaatcgttaagatgtcacagtttggttgcttaagatcaccttttgcttgttttgtttattcctctttttcgttttgttttgagacagtgctggcaggaactcactatgtagacctggttagccttgaacttgctgttatttttgcctcctcggtgctgggtttacagcataagccagagcctcctttttagaaattaaataaaaactgttatggtctcaattgaagtactccccatacgtccccgacctgtcccgtactgtcagtgtctcataagggactgccttgtgctctggggtaatgggatggggatgtgggcacacccatcaagtcaagtcctctttatgctcttacctacacacacacatgtgctaagactcatgtttatacgtgaggaattcttggacttagttattgttgacgcagtgttaaatgccaaagtttgcctcggtgataagtgtgtgtgcacatgtttcagttttgctctgtttagcccattccatgaatgtgacacatttaccatctctttccctgcagagggtgccattgcctccagttctcatccttgggctcggtgctataggccacaccttccagacacctattcaaagagctgctctagggagacaaacaggaacaatagaaacggagttgttggggcataaggaatgtgaatttttgtttttccttgatgctatcacatgtttcttttttattaaatttttattttgagataataattacattatttctcccttccctttcctccctctaaatcctcccatattcctctgttatacagttcttgaggagacagattagtgtttaccaaggaaaactatgtttaatactcatatcttgatcccatggccaagttaatgtatttcacacatggaaagcttcccagctgactacacttgtaccggatgattgtgttttacacctttaagcattaaggttttgtttttgtttttttcaaaagacatattcatcataaaacaatgcccaaaggaacaaagaactgggaatcacttaatccaaacataaacacctaccaaacattcctgatggaagcagctgtgtgttcgtgtttcatatccagagttgggctatgcctctctcgcagcatatgttaggaacatgtgacagttatctaagactgtaatagctctgtttgctttggaatggagtttcttctaggttcacagctgaggggaagggaataaagaagaggggattaatagaaggatgtgctgtgtgctggatctgatctgatctttgccatccagggacacaagggcaaccatgctttaccacagagggccatggagttggaactcaagaaagtctctggttcttctacatgacttatttcccttccacactgcctgccttccactgggatggtatccctgcctccatcttccatcaaatccaaagaccctagaaggtttgaagatgcaggaggcatgtaaaaccttggtggatccaacagaagcaagatcttttgaggttgacatccaccttcccatctcccatctcaggaaacctagcagcagagtcttcttgaaggccctgtctggggtggggcagataacagtagaaggatgaagatgaagggacatgccttgatggaaagaagctgccagatcctgaggaagggttctgagctctcccacatctgaagaggggatagagagtcaggggacatggaaaggtaaagctgaggtgccagcattgggtgctaaccctgcattccatgtaggaaaagaacggaaagcctgaattcaagagctaaactttctctattgcaacaattccctccctccacaacatcagcatcaatccctcctgacggtcacgccccagtgacctaggtcccacactgtaaaggttctacaactacgtggggacaaagcctctgaatacaaatctttgaggaacaaaccacgtgcaaaccatgacagtcaccaagccagggacacaaatcaccacatacccagcaggcttccaggatggtgaggagagagtgccctaatgttttttcaggctaaattgtcttttatgtgtatgagtgttttgcctacatgtatgtatgtgtgccatctgcattcatagtgaccaaggaggtcagaagagggtgttggatctcctgaattggagttatagatgattgtgagatgccctgtggctgctaggaaccaaacctgggtcctttatatgaacaagttttcctaaccactgaaccatctctccagctccaggctgacctttcaaaactatcttattacattttactgatttataatttcttgtacatgttgtggtcacactcattccatcctacaataattttgtttgtttggttttggtttttttcaagacagggtttctctgtgtagccttggctgtcctggaactcattctgtagatcaggctggccttgaactcagggatcctcaagtctgggtactgggattagaggcatgtgccaacactgcctggcctacaatgatattttttaatatttatttattgggagaagggtgcacacatgacatagcattgagccatctcaccagcactaggctaaatttcattctgtagatataaagcagtttggcatttcttgaacttgattgtgtggttcagaatgtggaactgactacatgggcagcagacccacatcatcacactcagaagagcctctggaagccaggtgttggtggcacacgcctttaatcccagcactcaggaggcagaggcaggcagatatcggggagttcgaggccagcctggtctccagagcgagtgccaggataggctccaaagctacacagagaaaccctgtctcgaaaaaccaaaaaaaaaaaaaaaaaaaaagagcctctcactcagctccactgaagcacttcattggttctgaacaggcaatctgtatttgtacttgtgtggacgcgctaaccaccaagtcaacaacattcgtgtgtgtgtgtgtgtgtgtgtgtgtgtgtgtgtgtgtttggagggggaggttcgagacagggtttctctgtggttttggaggttgtcctggaactagctcttgtagaccaggctggtctcgaactcacagagatccacctgcctctgcctcctgagtgctgggattaaaggcatgcaccatcactgcccagcctgcagcactcttcataaaccagcctaactaatcttcatcagccacctctgggtgtgtgtgtgtagtgtcatctccaaaggacttcactaaggaggaaaaacacactgtgaatgtggacagcatcatcccaagccagcatccaggaatggacaaaaaccagaaagtgaactgagtgccagcatccttctctgcttcctgactgcagacaatatgaccagctgcctcatacacctgccaccaaacctcccccaccacggtaggctatgttttttctttctattttatttgtgtgcggggagagcacaagccatggtataggacttgaggtcagagaacaacttgtaggaatcaatttcttcttccaccacgtgggattaaactcaggtccttaggcttggctgcaagcatcattactagtcagtaaagatgagccatcctgctgcccttcctactctcttttccaacctaaaccaaaatgaacccttcacttctaatattgatttggtcaggtattttgatatagcaacaaaaaatatgactgaggcactgttctacttgcaaaaagcttaaccacccagagaaatgatatccatatatatgcatatatcttttccacaaagccaaatataaacaacatgtgttataaaattaagtttgaagaatgtggtcatttgaatgaaaattgttcccccataggctcaggtgtttgaacacctgattcccagttgtgacattagtgtaggaaagtgatagcttttctggcagagatatgtcactgggttagggctgggagctttgagagtttatagtctcaccccactttctgtttcctttctgtgcttagtgtttatggttgagatgtgagctctcagcttctgctcctgccaccttgcctgccccttgcagctatgctatcccaacaagatgcattcttatggctcttataaactcaaataagctccttttcccataagtcacttttggtcatggtgttttctcacagcaacatcaagtgtccaatacaaagaagtagcatggtggtgcatagtgagagcagcctaggtggaaacaaggctgctcctggggtcccttttccatataactaggactctaaagacaccagggaactctgagaagtaaggaagtgttacagcatgcttgacctccttctagcagtagtcctcacccaacaggatggtgtcggggtgcttccccaggagagccagcgcaatatcgttctatggtccttcatttgcacgtatctgtagaagtcaccagtcagtctgaagtctttgtatatatttggagctgaattattccctagtaaaggtccagatgcttgtgatgtctctgcagtttgttcccaggctcttatacagatcgggtatactttttcccacatttcgatgtttgcactgctgcactacgaggtctctgaaggtactatgcaggctgagtgcacctgagggttggctctgaatgcacccaggcatgaggggttatcaggtggaggtgacaccaggaagcaagaggctggggcattcctcccttctacatcatcacggctatgccctccaacactcattttcctccaccacacataactctagtcttctttctctgtagtgaatatagaggagccacccatcgctcaccaaatcacactcaagctgctgtcttggctgtcttattgacagtcagcaactagaactattagatgctttcctgtgctttctaatagctctgcagtgagcattcattcctacaacacttccttgagagcagtggtcttcaaccttcctaatgctgtggccctttaatagagctcctcgtgttgtggtgaccccgaaccataatattattttcgttgctacttcacaattgtaattttgctactgctatatatcataaagtacatatctgatatgcaggatttctgatatgtgacccctgtgaaagggtcatccaaccccaaagggatcatgacccccaggttaagacctactgctttaaaggataaagaataaaggttgcccagagactcttcaatgtgaatgatactctgtgtatgaaagatagctgacactgagttcagatttctacagtcattaaagaaataatgatctccatgagatttcaatagttccaagcacatatgacaagcatgtgtcctgtagtttgaatgcatctccccactgtttgttggcgagtcaaatggaaatacagtatagttcgtacctcacaggctttatctagaagtcaagggtcagaaagcacctgccacagtgagagctcatcaagtgtcaattatcgttgtgcgctctccgtttcctcccctcctcctctcctgcctttcctcctctccctcctccccttctcttcattgttcttttctttctctcctacttcttctcctctctttctctccatctccctgtgatcctcttccttccttcctttccctcctgttcattgttttcaaccatctattctgcaccatggatgttgaggacaaactagcacttctcaggcttactgatgacctcgttaaaattcagacactcactcagaaggcctggggtggaggctgagattctaaattcccacaagctcttggtgatgcttgctgcaagccagtgggacacacttggtgatgttgagtaccatggtgacttgatgtccttttcgaatttccaggaacaaaacaccttgagtatgttcaagcgaagtaacttttcttctggactctttgggtagtgtgatgttgccctgtctctcaggaaacacaatctcttacttcagtgtaaggctctctgctgcttctctgaaatcaaggcatttttcacagcatggggtctctagctttacagagtttatatttaacatgttaacattcaagtacagcctacacaaagccagacctgggtgttaaatgaggacttcagacaacagagagcaagactccagcgtctgtacagaactgaggcccaaacaccggctttgaaatgttgaggatgaacatatgctccacatgccgggcagcattcatatgtcttaatgcgaccagtcctgtgtctctccatagaaatacacactcccacaggacatgggatgttgtggcgtatcgtcaagtgttcatagctacaagttttcctcattccccattactggagcaacctctagactgtgatgtggacccatctggaacatgcacacacaggctgctggctgctctgcaccattgtacccattgtttaagcaacatgtttatctcatctggctgcattttgtgggattgcagcccctgctctattacatctgaagattattatttgctatggaaacactgatgtcaaatggatgtgggtggggctcaggccatgaataaacacaaaatagttcatcccacagggtgcaagttattattgggtctaggaggtgccagctgtgtgggtcacccctcacaagctccatgttttggatggcacagtctggaaggcttcagggtatctcacttaagagaaaatgcatgtttaagaagcaggaacaccttgggatgagtgtattgtcccaaataggacacaatttccctgtggtaacatagaaacagagcagagaggtaacttgaaatgattttaggaaaacaaaaacttgtgttagcttgcttttgcatatataaatgtgaggtatgtgtgcatgtgtatatgtgtgttcatatgtgtggggggagtatacatgcaagcacacttgtatacctgtgtgtatatgtgtgtaggcccacagttaacactggctgtcttcctccatcattctccatcttgttgaaattgaagcttgctgttttagactactctggttagccagcctgctctggggattcctgtctcacatctcacaaggtaaaattataggcaggcccccatgccctcctagcatgtagttctagagatatgagtgctagtcctgtcctcacatgtaaacagcaaactctacccactgaaccatatccacacccctgaccctaacagttgttcactcactgtgtgtggtgagagaagtgatcaaatgttacaatcatccttgtagttaaatagggctgaagtcagccatatctactatgggaagccaatggagctaggagagtgtgttgtggaatattaataaagatgtattacattcttttatgctgtgaatatttgtttaatggtgcaaagaagtgttgcattcaaatatgctgcatttgttaaactctgtgaagctgtgttgctttgcctgtctaaaacacctgattggcctaataaagagctcaacagccaatagcaagacaggagaaaggatcgatgggacttccaggtgagagaataaatagagaagagcaagaagagaaggagcaagagaagaagaggagatgaggacgccaggggccagccacccaacaacataatcagccacagagtaaaaaggaaagaaaaagatacagaacagagaaaggtaaaagcccagaggcaaatggtagatgtgctaattagttcataaagcctttcaagttctaggacccgagtttggtccccagaacacgggcaaaaatgccacaggttcacacttgaggcaatctcagtactcaggaggcagagacagggagctctttgagactcactggccagctagccagcctacttggtgagtctgaaaccagtgagaaaccctgtctcaagaaataaatatgaaatctttgtgaagataagaaaaggaatgatacccaaggttgccctctggcctctacatgtccatgcaccacgcacaagtatacatgcccccaaaacacacacacacacacacacacacacacacacacacacacacacacacacacacagtgaagctaagggattgggaggagtttcagagtagggaaatttgaaatcatgcaagcctcagaactcaaatcaagtgtacagtgcttaagtctttcagccctggtcacaggatactgcttgagtcccagcctctaggtttcattttaatttattttctttctagaaggcattgctttttcctactatcctcttgccaactctttgcttctccactgcccctcccccaagtcaggactacacagctgagcagcagaacacatacatcaaagtccttctgaacccgacaatcagctcttctagctgcaggtaggaatacttagggggaccttaaacattattgatgttacaaatagtcaaattttatggctctaagctgcactccggttggagaattttaaagctgactagattattctaacattcagccacagccgagaatcatggagtcaaacaatgtcatgagtggccctcagaggggacatgtgctacacaactatccatgctgtgagtgacacacccttgagacatgtggcacgtgacccttcatgctgtctttgcccacccctctggaccctgcacgatccccaataactcaagagatcacaggctaaatgcatgatctggcctcgatttccccccccttgggttggagctggggttgaagatagtatagatctgaagccccccatccttgcaggatcctctgcttcctgctgccttctgacaagggaggggtgagtgagggttggaggcttctgaaaactcaggaatcttttcaagccccattttggaggctgcccagttccagtgctctgcccagggtgagcatgttgctttgattgcttggatgagagcatgatttaagttataggaagaatctggctcatttcccctggtacccaggtcattttccgattgtaaatcagcgaccttagggctgtattttcctctcaggccacaagggagctgtgtctttatttttttcctgaattcaaattgaattgtaccaaatacagtcctaaaggccccattgaggtcctagtacctccccaacatgtctggcttcctgctcttcccctcctgtcaccttcccaaaccaaggagcgcgtcccttagatctcagcccttacaatggtctttattcggcatgtgttgacatcctcagagcctaccacagggattcaatgtcaatatttttgtaacaactgatggccctcaaatggggagatggaagagaccaaaatcccacaagaattcagcaaaatgagacaaatatgtgacacaaacaagtcctcggtgttgtgctaagtccagagctggcctgctttacagcttagctctccgtgactcactggtattcttaagctgctgagtgcagctgtcattcggaaagtacaaggtgaacattatccgatgaagtcttccatctggcctatttatttatccttggcatctcaaaactgctgtttttggttccgcagtagggttacaagacaaacattttctttttaagttcaaaattctggagcagatatttgaatccagactgaagttgaagagacacagagaggagaagaaaagagaatgctatgaacggcagaggttagaagcctactccatccagttcactcttcacagcacaatggcaacaacaaaatacttgtttccagactcccttgcagcttggagtggccaattttatcagtgaggaaggaatggaagtacaacattctagaaagaaggaaagaaagaaagaaagaaagaaagaaagaaagaaagaaagaaagaaagaaagaaagaaagaaagaaagaaagggagagagggaaggagagggaaaggagggagagaggaaaaaattgtttctttttattttatgtctatgagtgttttgcctgcatgtaggtatgtgcactgtgtgctgcctggtgctcaaggaggcagaagaaagtgctggagccctgatgtttgtgagccactatgtgggtgctgggacctgaaccccagacctatgcaagtgctcttcaccactgagctgcttctccagtccaatcattctttagtgtcattggggatcagttctaggataccacacccttctcaaaacccacagatgctcaagcctcctatttaccccagcacagcatttacctgcaactgctagcagagccttcatactttaaataacggccatattacttataacgcctaggacatgtcctctatataagcagttgttgaatggtttgtctagaaaacagcagcaagacaaaggagacaacccatgttcaccagggatgcaattacaaggaatttttaatctgtgattgaagggtctggaactgagagacacagaaagcctatggaactttcagaaatgctttctctaagagttgagttgggcagctgaagagatggctcagtggctaaaagcactggctgctcttccagaggacctgcgtttaattcccagcacccatatggcagctcacaactgtctgcagctccaagatctgagaccctcacacagatagatatacatacaggcaagaaatgaagcaaaacaaaaatgtaagaacaatgcacataaaaagtaaataaaagagttggatcagctgtgagggcctccttttccctcatcaattacttaaaatggaacctcggcatccatgtcagaccatgaagtcactttgatgtaacagaaatacaggagccactggagacaggagaggcagccttgtagtgggttactctgatttcctacatatgacagaaagatgaacctattccacctaatattatctgagacttttagtcgaatgacagaattgaggggctggtgtgtaattgtgaaagagagtgcttgcctggcatgcacaagagcttgagtttgatccccagcactgaaaacaaaaagcaaacattgaattccaaataatacattagagtaaattttattttgttaaagttatattatcttatatttacttaagactatacacaatacaaataaaaacagatgatagatagatagatagatagatagatagatagatagatagatagatagatgctagacaaattatatactaaccacagactaacaaaacccacaatatggggcacaagaaacttcctttagtgtggttggtcagggtagcccaagtgactcccaaaacaatacaggctcttactgtagctctcattggcccctcagaggttaaagatgggtccctattgctgaaaatatggaatatttaggacacaagactggagctggatctgacttgaaggcctccttcatgcagtctagtttccatggtgccagtgcttgctatgtacattgccaacagagggaagcaattaatagtcccacccagctgcgatacctatgaaccacaacaatgaccacatggcaagatatctataaaggttctgtaagtggctctcacatgttggtgtatccaacagctatctgattggacttaaggcctctcaacaggaggggaatcatacctgggactggaaacttagccaccttccccagggttcatgagatcacagatcttagaagagaatctattgctgccactttgctagaccagcataattccttactacattctaaatcttacacccacagataggtgtagctactgccaccaccccatcaaaggacttctctttacagcaaatggagactatcacagaaaaccacagtgtagagatcaacagatagtggggagcccagccccaaaggatacgtctacatcacagctcctgcatctatggcttagggaacacaaggaagaggagacagaaagactgtaagaggtaaaataccaggaagtcggctgtgaaacagtgtctcccagaaaccagaaatggctatataaacaagaccagaatgatggcattatcaatggacatgccaacttggaaaggggaagtccttgtggggtcctgcacctatacaaagaactacaggcaactaatgactgctgggagaaggagaattagcctttcccagggatgaggttggttgtccaatagaaagtggtcagccctaagaccttaacacaaacaacaaaaacagactcagcagggagtctttgtgtgtgtgtgtgtgtgtgtgtgtgtgtgtgtgtgtgtgtaaataatcaaagaaaaagagattatcaacttgatagtggaggtatgtgagaggttagctagggaaagtgatataattctatttcaattaaaagtatgtgtgtactttaaaaagtcatctcttaaactatgctagggcatttctactcatgttggcagctagagtgagcagttttgcttagaataatgaacttaatatttcttgtgctgctcctggagagggaggagggatgaacaaaggagccaagatggtgctagagaaacccacagaaccagttgacctgacctagcgagagcacggagaccctagtcataaagctgcggaaacagaattggaccgaaccaggccctctgaatgtgggtaccagctaggaggtcaagacagtctatgggacctctaacagtggagccagtctttaaccctggagcacaaatcgactttgggagcccattctctatggagggatactactgcagcccagatacagcaaggaaggcctaggcctccccagaatgtatgatggattttaaaggtcccctgtggagggcctcactatccctggggaggagttggaggataggttgggggcgttggtggggaacatgggagggtgggagagtgagggaatgggggaatggatatgtaaatatgagtagtaattaaagaatttaaattaaaaaaaagaaaaaaatatctcttgtgctcatcaaggctaaggtgcttaaagtcacccagttaaaacgtggaagcgctaaaattacaattcaccctatgcatttgcttgaatgttacttaaaagcatgagtaactatctttaacactcatatagccttgtagagttttagttgttgttgttgttgtttctggtttttggagatggggtttctatgtgtagcattggagcctgtcctggtactagctctgtaaatcaggctggcctcgaactcacagagttctgcctgcctctgcctggaaagtgctgggattaaaggcatgtgccaccaccatctggccgagtttgagtttttaatgagtacatatgattatgcttaattcttatgaggctgtgtgtaaacggttagatccaccccaatccatactaaatctgagacatctagtagacatttgggttttccaacaatctcccttctagattctgctaggcctttgtgagtcaggttcctggatgtctctttttcttctagctctccaccatgcctgtgctggctgggttttatgttgacttgacctaagagtcatctaagaagagagaacttcaactgagaaaatgcctccagaacatggttctcaacctttcctaactctgcgaccctttaacagagttcctcatgttgtggtgactcccaaccataaaaccattttatttctacttcataactgtaattttgctactgttatgaatcataatgtaaatatttgataggcaaccaccaacggggttaagacccacaggttgagaatcactgctccagaagatctgtctgtaggcaaatctgtaaggtattttcttaactagtgatcaataggggaggtcccagcccactgtgggtggagccttccctgggctggtggtccagtgttctataagcaatcaggctgagcaagccagtaagcagcactcctctatgtcctctatatcagctcctatcttcaggttcctgccctgtttgagttcctgtcctgacttccttcaataatggactatgatgcagacgtgtaagccaaataaactctttcctccccaacttgcttttggtcatagtgtctcatcaaagcaatagtaaccctaactaagatcctcagtcatcagtaacagctcctgtgtgaatcaaaagagaagactacctgagcttccacacagtatctcccttgtttagagaatttgggttagtgggtggttccatggtcaaggctgactttctaagattacactttcaaagtcagtcagttactgtgctgataatggcttgagaggtagaagagagcaatcaacaagactatcaattatctgtggcaacccaccagccctcaggagaggagaccgtctctgtttatttgggctgagctcattcatggagttggagtgatgattggatttacttaggaaacttggtttggaggcattctggcaactgaccctcagctaagcatgcacacaaaccctgagatctgtctgcagatacgaaaagtttaagtcgtgcccctacagcaagaagccatctgagtccctcttcccactgataacagtgtgctgttctattgttgggcctggaccacgctaagccctagaagagaggtgagtaccccatacaatggtgctgttagggctcacagctcagagcctggctaagacagcctgccagtgacccagactccctaagtattcttcatacagtgaaacaaatttctgaatgcctttaatattaaccattttaaaaagtttatttattgtgtatacagcagtctgcctgtattccagaagagggcccagatctcattgtagatagttgtgagccatcatgtgattgctgggaattgaactcaggacctctggaagagtagtcagtgctcttaacctctgagccatctctctagctcctataatattaatctttaatgttctttcaacatgatgttaaaaacaatggttgacatgggaataaagtctttagaaatgcataagaaatagctacaccgcctatataaggctaggtcctggggctggagagatagctcagtggttaagagcacttattgctcttgcagagcaccggggttcaattcccagcacccacatggtggtttacaatcttccataacttcagttccaggggatctgatgccctcttctgaccactacaggaccaatcacacatgtagtgcacatgcatacatacaggcaaaatactcacgggtggaagagcaggaggaggagaaaggggagaaggaaggaatctgtttttaaaatagctagatcctttgtggttggcctaagcatattttcacatttaagggaaacagtacaattgggttctactgcatgtagcagagaaatgaaaggatagtggcttaagcaaaatttactgaataaacaagtttgtttttctttagttgatcagaatcctagagcagaccatcaggcagaattaaggatatggaggtaaaggccttttagtttcctttcatctttttgttcctggacagtcgtcacctcactacaggtggctgttgggatacctctaatcgcatgcaagcctgtgttattctgtaaaagcaaaatttcctcagccctttaggtagacattcaggtagcctcttccccaaatttttccttgcctctgactagctagaactaatcacgtggccatgtgtagctgcaaaggtagctgggaaatgtagtcttttaactgacaaattaccatgtgtttcccgtgatcttttggtcttggaaacattttagacccttaaaaagtattgaggaatgccaagaagtcttatttatggagcaatatgtcttattatttaccatatcagagcctaaaacaaaaaatagaaaataattatttttcattaatttaaaaataaaaattatgtggttttgtttgttttggttttttcagacagggtttctctgtggctttagaggctgtcctggaactagctcttgtagaccaggctggtctcgaactcacagaaatctgccggcttctgcctcccaagtgctgggactaaaggtgtgtgccaccagcttctggctaaaaattatatgttaagtaatgtgttttccaaagcaaaagtcccaaaagcatgataagcgaagttttttgtttttattttttacaatttctttaatgttgaacttagcggtgtcagtcctcttacatctgcttccacctttaatctgttatgattttgttttggttaaattatattaataaactcagacctcttgtagatgtgtagtcagaaaacagagaagtgattttttaagagacttttcagatgatatggatatttttcttagacttgacaccaaaatgtatgtgatagttatccggaaaggtcattgcaatatagagtctgaagccatcttcgtgaatgtctgctggtctttacattaaaatgcactgaaatgtttatacattgaatgggtttctcccacacatgttattgtacagtgtcatgtcatagtcatgtggactggtctgtttataggttaaatgtcttctcccacacatgttattgtataatgtcatgtcaaagttatatggaaagtattcgtacttcaagctgtgcagatcttttgaatgtggacatatttcattgtatagtatttcttaaaccacattttttaaacatcactactggtcttaaaggaaaggcctactttggggatactgtcaagctaatggtgaacattgcttcccaaagttcttgttttcgtgtgagaggttgagggttatgactcaacaaatactgtcaggtatttcatttgaagtggcagattcattgttcaccgtgtctcccaaacacatgagcctgagtcactcagagctgcctacttttatttttgaaactagcttttactacacggcccagaatggacttgaacccttgatccttgtgcctcttccttctgagtattgtaattacaagcatgagctaccacaccccggtcagtaagttcaaatggttcttgagagaaactgttggttcagccagccacccattcacagacctgctttcttcagagcgacgtgcaacagatgtgtgttgtatgtgcctaccttctcccagactactaaaaagacatgttcccaaggcttggtgtttaaccctttctgtaaggcagtttgtaatgaagctgccatttggtccctctacactgagggttgaacctaggacagtcatatgctctgcagcgctctcccgaacactgttcttaaaccctgtattatgaaacatgttgcccaggcggccttgaactttagccttctgctcagcttcctgagtacaggccaggtttagttttcactgtaagtattgggggaaaatacagctatttttaaattgtaatttagtcagttcacttatttggtttttgagaccaaataagtttttgtagcccagtttggccttaaagtcaacagccctcctgcctttgcctcttcagtgctggcgttacagatgtgtaccaccatgcttggctaagaactactgcttggcaatgtgctgcttcattactctcccacgcctactattacaaactaccacaaacggggtgacttaaaacaacagaatttttttctcttgcagtctggaatcaagatggtggcagggccgcactccatctgggaattccaggggacagtctgttccttgcctcctggtagctgctggcattccttggctggtggccacatctttccattctctgccagtgttacgagttggcattttctctgacctgtgaaatcttcctctgtctcttttctgtaaggatacctgtaggtaatggcagtacccacttagatgacccaggataaataatatctccatcttgagggccctagacccatcatatctgctaaaactgttttcccaaacaagttaaaggtgacatgtttcaggaactaaggtctggtgtctgggtctagcacgaacggctgctttgactggtgccaagccattggcagtctgatccactggctctggcttttgcaacatcagtaaactgtccatatgatgtggatgttttagaatggtattttattggtttttcccctgcccccatcagtgttggaggtgggagcatcccagggagtcctagagatctgtgtgtatcctctgaccaatgcagattacatgtgaacagagccagttatgtagatagaattttctgctacagtagccaaggaagggaagctggtctttgtgctgcttttaggggacagaaggtatgaactctcacaggacacatcctcctccagaggaaggcttccctggggattctatgcctgagctgagctccacagaaccctgatggctgtgcacagtaggtgtgcctgagctcctcagagccctgaagggtatgcacagtaggtgtgcctgagctcctcagagctctgaagggtatgcacagtaggtgtgcctgagctccactgagccctgatgtgtgtgagcagtagctgtgcctgagctcagcaaagccctgaagggtgtgaggtaggtaggagggttcctccgagaaagaaagagcttctggtgtggacagagagctgacctggggaccagcaaagcacacaagaatgtcccagggcagagcttcaccatactcacagtggtcagcctatttctgtacaccccacccaggctgtcccttacagagaagccagggtcacaccaagcctctgggtagtgtcccagttggttcaaagagccaggctgcctggtagctcccctctgaccacactgcctctcccaggtgtggagttaattaccccaggaactcccagcctgccaggaaagccagttgcttaggttcctcccattttctcctctctaggtagaaggtggtacctcctgaggacccagactgctactggcaccccacacttttccaaggtgcaacagcaggtctggattggaaacgtgcatgcacctgctaccctgcctggacatgtcatctgggaacttcagcaacaaaggcacatggggattatcaaatgaatgctgctccagagacatggagcctccaatcaatgtgaaagtgtcgtgagcatagtgggtacagtgttgcttatacattgatgtgtatacattacacttgtgtctgtgtcagctttgtttctgcttggaagactgcaacagggtccacgaaaactattcattagcagaactcaagaagacagggtcaacagcagatgtccacagagagaaatgcctccatcaggttagcctgtgagcaaatctatggaagcattttcttggttaatgattaatatggaagggcccagttcactatgggctgtgtcctccctgggtgggtggattccggttatgtaataaagaaaactagcatccggagagatggctgcgtgtactgttctgccagaagacctgagttcaattccaagcacccacatggaggtttacaaccacctataactctagctctagagggatctgacacactcacattaatttacacacacacacacacacacacacacacacacacacacacttatacataattaagaataatactaaatataaaataagaaagcaaactgatcaagccatgagaacaagccagtaagcagcattcctccatgtcccttcctctgtcctgcttgaattcctgctctgacttccctcagtgatggacatggaagcctaataagccctttcctccccaggttgcttttggtcacgatgtttatcacagcaacagaaacctaactggacgagaatgtgtgttaattcatatgaataactttataaagaggtgctatatgaatctgatttcttttttttttttttttttttttttttttttttttttttttnnnnnnnnnnnnnnnnnnnnnnnnnnnnnnnnnnnnnnnnnnnnnnnnnnnnnnnnnnnnnnnnnnnnnnnnnnnnnnnncctgcctctgcctcccaagtgctgggattaaaggcatgcgccaccaccacccggctctgaatatgattcttaaaagtcattagttagtcttccattttccattccagaaataaccattaccagttcttgtgtatagtttgagttttccatgtataaaagtattaagcatatacaagaatatttcatacttattcatgtgttcatttattatttatgtattggtttttttactcacaagggtggatgagagaatgtgcagcccaggctggccacagtctcataatcctccacctctgcctcttcaacatccaccagagtgtgccactgcaaccagctatctctgtacctttgaagcaggggatctcagcatagccctggctttcctggcctagaacttgcccctgcttccttagtgccggaataaccagcatgcaccactcttgggtccacattgaaaatgttattcttttgagctaaggtctgagagagttagacagggaaaatagccctccccttatagctcacgtatgaacaagggctggagagcacattcctgtttgagtctatgatttacaccagtgtaggttttgcaacacagagcagaatccttctgaaacccagggaacggatttccttacccattcatctggtcgtttatcttcttaaaagctcaagacaaacaaaattccctgtccgagacctctgtggcttcccaaggcgggtgagaacagtttccaaggcgtcgtctctgctttctgatttgtcatcaattcttccactgtgaccccatgaagctttatttacagcagctttctgttgattttatagccaactgctgactgcttggggcataaaaaccttgatgatttacaagtaataagtgaggaagaaatccataaatcagactgtataataagagaacacaggtgaatgagtgtgtacacacctctgagagtaaaattgtatagggcaatattttaataaagaccaagtgagaggcttcacctttgattttgaggaattcaaaggagattttatggtttctaggcagagactgttacagaaaaaaaaatgtattgaccaggtcaaagtgttgaagtttgacaaggattcccaatgctcccaaaacaattctgtgaaagataattctcaaacacccaaaatccctcttgtcaaacttttttctcttttaggcctctgtgtgtgtgtgtgtgtgtgtgtgtgtgtgtgtgtgtgtgtaggggggggtgtctaataacatgtttaaagtagagacaaaacctacaaattccataggaatcctacagctggggggctgctgacaaacagatgtgaagtggaaaaaccttaaaaaacatttttgtttggaaagtaaagtctgcttaccactagaaatgtattgcaaactccctgccacccaagatagagtataaaacatccagagttttaggcatttaggtattgagtaaaataatctcattttattgggatcttgatgcaaatcaaaaaagtatgagaattagaaataaaagaggggcaattgcgtactgactagatttttgatatggggcaattatacatttttacatgtgaagataggtgttatagttgtttatgagctttgtttttttaaagatacacaataaaaattgcttttatggttctctatgtagccctggctcttctagaattcactctgtagaccaggctgtccccagaatcagagaacctgcctgcctctgcttcccaagtactgggattaaaggcatgccccactgcctagcttaataaaatgttttagattaaataatttggtcatttttttttaaatgtgcaggtgaccgtgcatagtgctgttaagttgataatcattgagtttgggtgatggctatacggatttcatagactattatcgtcactcttctatttgttccaagatattaaatcttgtgaaaaacacataggcccagacatggtggtgacacctataatcctggcactctggaggttgagccagaaggatcatgaaagttgaggtcagcatgtctacgtaatgaaaacctgtctcaaaaagagaaaaaaaaaaaactcaggagaaagaggcaggtggatctttgagtttgaggccagcttggtcttcagagtgagtgccaggacaggcagggatgcacagagagaccctgcccccctccacacccccccaaaaaaaaaagaaaaggaaggaagaaatggagggaggggaggggagtggaagggaaaaggaaagaaaaaagagagaaaaggaaagggaaggggaaggaaggggaggggaagggaggggaggggagggaacagaaaggaaggaaagggaacggaaaggaaggagaaagagctcagttgagatagtgcttgcatgcaagcaccaagaactgggtttgagccttgagccccagaatcagttttaaaagaaggcttagctatatacgtgtttaaaatcccagagacagaaagacacctgggcttcactggccagccagcctagcctacgtagtgagttccaggccagtgagagaccctgcttaaaaaacatggtagatgtcaactgctccatatgtatacacacacgtgtgcgcacacacaaggcagagctccagaagacagacatgaaggtgtatgcctgccgtcacatctaatacaatgttgagtgaaggggtccatctccaaacaaacagacaaaaccctgcaaacagctggcaggctaggtcatcttttgctaagttctcatacagtcaccttgcatttgctactcaacagggacaaagtattgactgtgtacaggatcagtgaggcccttgtggatgctgatggtgccgtggacattaagatagcatgcaggttgtgtgtgacaggtggggacaatgctgggatctataccatatcatacctgatggatactggaacttctcaattcatggttcactgaaggtttccatgttatggcttcagagaggagcatcggtctaggatacagtcacccccacagtattgaggaaatcctactccacctgtctaacagtaaacaatgtcaaagggagtcccacaagactgaagctgaaaacagacacccaaggtcagtgctccaaaaacaagaggctttgtttttctactgtatcaagaagaaaagcaaggggagagagagctgaaagggctgtttgtgtagccaaaggccacagggtgaatttggaaagttgctacatacaggtttagtggagcaaaggggaagtgaagggagtccctggggaacctatacctgcagaagtgctgacccagtattggaggagggatctgcctgcccaggctcaagagaaaaagggtcctactggctctattgaagcatcttgccatgggagtgctggtcttgcttctcatgagctcatgcctgctgcaccaaaggcatcaacagctctcaactttgtcaaccagaagacacaactcatctgctccctgattggtaacttctttgttgttctttggttgtcattgtttcgagactcagcctagcctggcctaaaatttcctgtgtagctcaagcaagctttgaacttggggggatcctcctgcttcggcctgccatccttatcccagaatgctgaagttacaagagagacccaccatgcccataggaggttcttaaggaacttgtttcctttattcactagccttttctccatgccatctttggggccctctgctggaaaagtaggctcaagtcctaaacaattgcagttcagcgtgtctactagcaccataataggtcagtgtctaacctcaatggctctaaaacagcttatacttgctccataaagcgtagtagtgaccctaccttatcaaaactgttctcagtggtgctaccagaatgttctctgtccagacaatgattggcagcctaataaaaaagaaatggtgccagtcccataacatcaacagaactgggtctttcctaggattttggtttttacttttttttttccaacgaagtattctgggtgtttgtataactgttattggtcttttcattcaaacataaagttaaatatatacatatatactggatttttggaaactagctgtgttgaaactttgagggaaaaaaacttcaccatgttgagttaccattgcacagaaattaacagctttattaaaaatgttgaacttatttttttcttatttgtacagcagtaacacacagtattaaattgaaaagtcttatcggtgtgggtttgattacaacagctactaaagtatatatatatatatatattaaaaaaaccacttgtttcctatagtgaagaagacccttttcagcaacatttttgaattttctgtaggtggtctgccacatgaccccactgaggctgagtatagtgtgaagacgctaataagcctctgggtcttggcctaacagatcacagttctctctttaaaatactcccacagaatcctgcgtttctagctgctgagtcaccgcgttcccgggatgcctgtgggagccaaagacttcccacgtggcccctgtgctatcagagcccccaggtgagagctgtcctcaggctggcccctgctgctctgccaccaacagcagcccccatctcagttggctgaccgatgctgcacccagcagctgggtcccatggcccagatcacagccattacagctagtatggctagcaggctacccactggctagtgcgatcactgaggtggagggagaaacgctgagacctcagaagccgatcgatcctttcatcgggagccttgggaagcagcagcagcagcttccttgtttctatgagcgaggacaaattttgtgtggtgtttaatgagggttccagcgaagtgctgaggccatgtcagactgcaaatgagttagtctaatggagttcacccccttgctcatgcaaatgaccctaatgaaactcaatgagccaaacatacaacacacacacacacactcatacacccacatgctcacacacacagtcatacagtcacacacactcatacactcacacacagacacactcacacacccacatgctcacatacagtcatacacacactcacacacatgcacacacttgctcacacataacacacacacacacatactcatactcacacacactcatactcacacatagactaacacacatgcacacactcacacacatgcacacacacatacactggcacacacagagtaagagaggcacatgttgggaaggagggtttcaatgggacagagagaaggcgataagaacggttaatttttttttaaggttcaaattgaagaaatggaaactcatctctgatcaccaagtattttcacctcaaacaatgaaattgatgatgaaagtacagggtgcaaggctacatgttaaccttctcattattcacaccgtactgcctcacatgtcaccagactgttccgactgcattgaaggtcccctgaggtggtggagaattgggggctgggcaaacgattgtgtgtctcacagcaagaaaattagcgagttcactccctgtggacaaaagactaaagctccctttagggctggtgtagcaggtaagacagcttctctggcccacgtggtggctcttctgctgcctcccacaccggtttgcaggctcctccctctgtgtgctgtccttccttccctttctagtaaatatgaaagttcctctaagttgtccctacatagtcctcactccctgaccaacaccaaccagtagctggcctgaccctgtgaacagcactccctgggtttacacaggctgtggctccgactttacttctccaggattccccattggaatctaagaataaccaatagataatagagaaagtaaccagtgtctatttatttccccactaggccagcagcaaccctgagggccgagctgtatctgctcttttcctggtttggtttttcaaaaatatcttctggctttggggccaatgtgccaacacaaaatagatgtcaacaaataagcatggcttaaaaaaaaccaaattcccacccttatccttcttttacaacagagttgtgtgtgtatcaggctggcctcagatgtggtctggaacaaacaataaccttgaacttctgaccctcctgtttccgcctgagtgcttgggtcacaggcatggaccggcatgatcagcatatgtagcagtggggatcaagccagggctctgaatgctatgtttgtagtatatcaactgaactacactcttagctcccaaattccagttttctgatcccgacactattgcaaacctcacatacaccttaaactcctgaggacattagtcctgaagtagcgttattggagacataaatgacatctatgttggcatagggattacaacagtggtgttgaatgattgtgctgcctggagctaaaatccccagaggtcccattcctgaaaagctgactctcccagcaatgccaatgtgactgtctgccttgtccaacccagctctgtgcagattcgctttcctgatattttcctttccacgctcattatgactcaaatcatgattggatgagggatagggctgtgtcatttgtcagtcagcatgtcattaatgatgctctgtcatgttctcttctcccagttttctccctaaagtcagcggcccttagctaagagacccttagctaagaattgggggattttgctggtcgtgttggtgcctttaatctcggcacatgtagaggcagaggcaagtggatctctgtgagattgaggccagcctgatctacacagttacaatagtgagtgtccaggatttcatgaacatgttggatagagagtcagcatgctgagtataaagacttctagttttctattacttgttattaccaatgtgaaaactcactataaaagcttttatccataatgcataatatgaatcatagtaataagccaagattattttactatcatagaaaaagctagatatttctgataaaaaataaaaataacatatatatatatatatatatatgtatattaattcccaaaaccttaaagacctgcttatttttgtttctttcctgggaaaaacacctttaccatgaatggccctttctctttgtaaaacctttagacacctaaagtctgcacctttgttatggttgctgatgacacagttgagatttaaaaagatgaaggtgatcagcttcctgtgttctgagtattatgagctcttctcacctgtggagatggtcgccttgattcacagctgtccagtgacagggcagcttgaatctgtggaacgttgtgtttgataagccacctggctgagctagttgaagccaacagatgtagcctgggggtgggggtaggggagtggggaccaggaactcactcacatacattataccttgaatttcagccttgcagaagaatatagtagcagtgggagtcactgtaatttggtgacagcttatggattttattcattattccactgatctcttccacactgtctcatcagccatccatactattctaacatgaggcattattttatttcactctattcatttatttgttaatgggctgtcccttttttatttcttttacagacttttcgatatccaagggaaaccaaacagcaaccaggttgtttgggataagtaagtcgactttggaaggtctggcatgggtgcagggaaatctctatggggcctcctttctcttccctgcttcactgtcatcactctgaaagctgtcatgactgctggagttgaaactcccaagacactaatgccttgaaatggagacggggtgggggtggggaaaacaggtgaaccttagtagagggatcttacttgggtttgtttttgtttttgtttttctggcactgagcatgctacatatcattctaagtgatgctgccagctgcagagaatttcttacctctgagaattcaaacccgcagcagggcaatttccccagggcagcttaatttaacagtcttgtgacatttcacaccccacccccacttctttcccagcttgaatgacatctgtaagattgtctgcactgctttggcatttaacttttgaagatcacgacacaaatttctccaagtatcacatcacaatgattcaaatgtccattctctagcattacaatccctagcgagggagggcatatatctcctcataggggggaggagagaagtgtacacagtcctcttcttccatctgcatcccttctagctggtcggcatcagagctgggcctgaaacagcacaaaacacagttgcacttgcagagatccattgccgtcaccctgggtggcaggttacactgtttacagtccctatcacctgcctgtaggtccaaacatagccatagatactcattgtgatgctaaatgggagaggaacaatcccagcacccagcatacctgtcatttccaacagccacgaaaggagggtagccctcgttctccacaaatgcagcattgtcttgagggtaaatggtatagtactgagggggacttggtgcggcagccactgccccgctagaaggtacaagaccgcaagggttcatcatgggctgcagataggcggcgttcatccccagaggctcctgagaagcgtaaggaggaggaatgtactgcaccacggtggccccgtggaaggtgatgggctggttgatgccggtgaaaacgaacgactgtcctcccgaagtctggtccgaatccaggaccctttcctcactttctgtgcacaactggcaggatagcattttgaacttgcacacagcgatcaggatgaaggtcactccgactgagaggaggatgggcccgaggagctgggtccattcaaagtgggagacaccctggtacttgatccagcccatgacagtgaacgtgatccccaccagtcctagaaagatacccgagaaaagcaaagtggcccccgccttgtcgtcgtcggacacctggatgtcggcggtactgggtgtgtaaggagtgacagagaacacattaagcgggaagtcctctgagctgctagtgttgtgctccatggcttcccacacaactatctaacatgagaggagaccgagtctgtgggagcagggagtgcaggttcaggttagttagagtaggacctttggttttccgtggttaacagagtataacatgcacaggctgaactttgtttagaagaactaaggtccaagaaatgaggtctgaagttttgttgcaggtttccagaaaatggaggtttctgttttatgaaacagtggccaactgtctttctactttacattcattcatctagacatctactcattaaataagaataataataaacacttctcaagccactgttgtgtcaggagatgctttcctatagtcatggcactgcactcagttgtgtttctatcctaccaaagccaggtttgtgtaaatggcagcactgctcccaaggtgaaaggagttcttggtgtatctaccacctgcctgaaacctaactgaactttttgttttggttttgattcttgatttttagagatagggttccagactgtcctggaactagcactgtagaccaggctggctttgaactcacagagatctgcctgcctctgcctctcgagtcctggcattaaaatagtgtgtcaccactgcctggggtttctggctgggtcacctcagcagaaataggggtccatacatagtatttccagtcttactcatgtaaggaatctcctaggccattttctaacaggaaaccacagctgagtcatttttacagaaaagacagctatttttcacagttccatgtttctgggaccaatatcaacatgctggcatctacagacggtcttctttctgccacctccaccacctgatgagaacactacagtacatgtctctcttcctctcagaaagccactaataccatcagagggcccccccacctgattatgtcccaaaggcttgatctccaaataccatcaatacatgaatccaagaagtgagtaacgtacaagccttgggattccactcaagccacagctctcagcaaggctctgagaacctgctgtatcctggcctgggttcacgtttctctagctttctgcggctggggagaaggaagacagcacaggagccctttctgtgtgccgcattgctggcagaggttttgcatgagcatcagatgtggtaagatgttgcctggacaccgacctcaggccctgtgttctggtggctgcacagttccaggtctccaatgtaagacaaacagctgactttttgaacctcccctgttttgcaactaagcctaagctgatgtaaagaatcttcaaagacattatctgtcttttatgactgactagagaatttctatagagacccatggacttcttcctccattgaacggcaactctggtcttgttcttttttcctggacagactttgtccaagcagctcctctcaccaatggttaaatattacatcaggttccttttgcataagtgagagagctgcccttttgtccaaggcagccttcttaaacttcttcagatgacaacccactattttctttttgataggtagagatggaggccagtctgccacatgaggttagtaaggactggttttactccccagctgtgtccctagctcttaaaccaacacaaccaaaacacccaagggagaagatcttgaagtgcctatgatagttaatcttcactctctggttaaccagacttagagtcaccatggagacacacctctgggtgtgtccagaaagatttaaccaaggagagaaaatccaccctgaatgtgggtggcacagtctcaagagcttagtaaaaagaaagaaagctggagtgatgtctcagcaattaagggcctgtgttgctcctgtagaggcctgagatttggttccctgcacccacacggcgattcacaaccatctgtaacttcctttccaggaagtatgctaccctcttctgtcctccctagcaccaggcaggcatatggtgcacatacatcatgcaagcaaaccactcgtacacataaaaaaatagtgaaatagatctattttgttttattttgctttttgagacagggtttctctgtgtagctttgtagaccaggctggcctcgaactcacagagatccccctgcctctgcctctgctgggattaaaggcatgtgtaccaccactgcctgagtagatctatttttttaaaattgtgaatgcttattttattttatttttttaagattttatttatttattatatatacaacattgtgcttccatgtatatctgcacaccagaagagggtaccagatctcataatggatagttgtgagccaccatgtggttgctgggaattgaactcaggacctctggaatagcagccagtgctcttaacctctgggccatctctccagccctcgattttttttttttaaaggagaaagtgaactgagctacagtattcatctctctgctccctgagtgtgaacgcaatgtgactgaatggctcacagctctctcaccacacctgtccctgccctgatgactgtaccttcaaactgtaagccacaataaacctttcttctgttaagttgctttgtcaggtgttttgttagtgcaatgtgaaaaataactaacacagtgccccatgggtctcatcaagactcttagaaaactggaacccaggtgaaccccaaatgcttctcaaagccccaagacttgtttctacctatctaaatgtctctctttgctaagagacatgacctagaacctcttgtttccctgtcaggcatatggaagagcagtatagtggcctcagaattcctctgagagcctccaaacagctaaggttgggccaccttgctgaaggagggaatttctttcctcgagtccacagacatcgacagatgcaaccttctaacaccaaccaccttctctctttggtcaaaatatctctgcttagccagcttaacatgttttccgggctcttacgtcttgagtctacatagtctctgacactcagaaatacccaggctctgaaaactgtccttctaaagcatttgtatttgccacttgtctttagttataatatacatcacatatttatggatgttgtgactagttactcatctcaatgctgtgaccaaatccctggcaaaaataaagcagaagggggagggttttctttggctcacagtctgaggatgctgtgactcctcgtctccagatgaggtctcatgtctggacagagcaggaagcaggggtgcaggtcctcagctggagctccctcactctcccaaccacacctctttattcagttcaaggccccagaccaaagaatggtgtccacattcctgcctcagttaaacttcactggaaacatgctcataaacactcccagctttgacctttggtgatgtgtcaaacatttactggtaataaatcattaataaccttattttagaactattctttggtatagatacaattttgccatttactaaagtaacagcaaatttgcatgcaaatggagttcgtctatttacttttatataaagaattaaattttgactgaatatttgatactgcagtatgacataaagtatgttccgtgtttgtctgcatttgattgacactttgatttaatgagcaccagtgctgagaacaacgattttataatcagcaatgcctcactcaaatgtgtggtataaaatgcctgaagtttgtttaggatgacaaaattttttgaaatttcttttctaattccaaaccaaaactcattgaaaaaatttttttatcaaggtcaagtttgtcattctagcacagggcaatctaaagacacactcagaagtaagggaaggaaagtatcagacgttcttatgttccataaccaaattatgatgttcctacaacaccagaaaagtgtatgcacagtcaaactaaggcagttggttccatgtgatagtctagaaaccaagcctgtagtgcaaatgtgaccttggaaagtgacccaagcttcagtgaagctgagtgatacaaccaacatgggtgagtgctgttggacacacatcagatccattttacatttaattttgaattgctgtttagacattgtgcattcagaaaccctagccaagttttcacagaccgtcatgcagtcacgtggcctcagacttaagttgtgctctgaaaaactgacgtttcataaaaagattgtttgtttgtttgtttaagggaatagggagaagtgggtaaagtactttccacacaagtgtgagaacctcagttcagatcccaacacccaggtaaaaccagccatgatagtgtacgtctataaccccagcgttcctacaggaagactggaggcagagtcactgggagctcgtaggcccatgtagcctggcatacaaagaagcaaacaagagaccttgcttcaaaaaaagcagagggcaaggaccaatgttaaggatgtcgtgcgatcactgcacacgtagtagcacacacacgtccacattaacacactcaaacatgtgtacatacctcataaacatatacacgcacatctcacctctctctctcttccctcctctttgtctagtccttaattagagctcattggaaggttctggaaactggaaattggggcctagctgaagaagatagatcactggaagcaggttcttagtgtgtgacattcttgcctctttccatcacccgcagcttcttatttagccaagcagagaacagctccgatctgccacccactgctaccaccatgatgtcttggccaagtgcaagagatcaagcaaacatggactgaaccctctgaaaccagaagccaaaagcaatctgttggaccagaagtttctctccagtattttgatcataggaacacaaaaatgcaaacacaccactaatgctaggatttttatgattataagcacactctctcaagtgattgacagctttggtgttcaagtcagtttcctgcttcaatttccaaactccatttctattctatgggtgtaatatgtcattgggttacatcatcctatagatgtaatatgtctatagaatatttgagaatattgagtgttaaaacttgaaaatcattttctagctaaatgtgtttcatgagcatccactgtaattaaggagaataattctactcatgtcatccatacctaaccctgtgtctggagagatggtgcttcattacagagagagtaactcatcatgggtatgcaaaggctgcctatgtctcctgagttattagttttctgtttcatatctgttgaaagcacctacatctgacacattatttcctttcaaataaacattactgctaattaactccctcaaataggaaaagccatgcctgtatggtgctgtgcacctgaagtccccacacttgggacgacagaagaagatagcaagtttgagaccagactgggctacatggtgagaccctatttcgaaagaccacaggaagcaaaaaaagggggagggggaggcagaagagaggagtggggaggaatgagagaaaaggagaagagaaaaaatagaacaaaggcaaactttggggtgctgttctcaacaaatacagtaactactgaagaagtctaagaaccccatcatattaaaaaaaaaatgtctgcacccattattgtctgaccagcatcccccgtcttcacaggaagcatgtgtggaaactgcactgaaaaacatgggagtggtcctcctctgtctgcagttgcaatgacaaatgaaaaccagtgaactaaaaagaaatacttaaaaggttgatgaaggccacttagaaattagtcctttggcctggatctattttacacaaatttaaaaaagaaacctgtaaaatggctacattattgacatctgtgcatttctgaaaacattaaaagtttccatagtcctttgcaatttttcaaaaatgactgctaaagcacattaaaatgcacctcttgagaagctaggcaaggtggcccgtgtctgcaatctcagcacctgggaggaagaagcagaagaatcagtagttcaaagtcatccttggctgcataagaagtctgaggccagcctggactaacaagaccctgtctcaaacaaacaaaaatgtgcattttgatgagaactacctttttcatttcgtctgcccttgacccaaatctttcttcagacacatgcagagaatggagcctcttccttcggaagcaactcctggtggtggtttttgttttgttttgtttggggactggggttgagacagggtttctctgtgtagcactgactgtcctgagctctctttgtagaccaggctggcctcaaattcatagctatccacctgcctctgcctccagagtgctgagattaaaagtatgtgccaccactgcctgccagatgatgttttatctgctgggctgaccatgatttaccattagaatggacctaccttcttttttcacataaatagatcacattaactttatgtttcttcagctttcttttttcttaatttcatccttcccaaattcatacaatttaactcagtatcttaataagaataagtgatgcaatcacagctggaagtttctcagagaagagctaagaagataacaacaagctactgagaatttagcaccttcatttcacagttataaaacctatagtttgaatgagaattctggacagttatttatagtgtagtaatggcatattttgggagagagggaaaacagacaccttttagcatggttgggagaatataatggagctggggatcaaacctagggctcttgtgtgctagacaagtgctctgatatagagcatatcccaaaccctgtcacagggtgggtatcttacaatataataccatcacacaggcaccaccaaacagtggtcattatactatggccatcaaacagtggcaatcacactgtggccattacatggtggtcatcaaacagtgatcacacgatggccatcacatagtaactgtcacactccgactatcaaaaggtggccatcattcagtggtcatcacatagtggccatcacaatgtagccattacacagtgacctcaaatagtggccattgctcagtggttgtcactcagtggtcatcacatattgactgtgacacagtagccatcattcagttgttatcacacaactgccatcacacactgtccactactcagtggccagtatattgtggctatcacacaatagctatatcacagtgactatcatttggtgcccaacaaacgttgtccatcaggctgtgaccatacacagtgaacatcactcagtggtcatcacttagaggccatcacactggtcatcacacagaagccatcacagagtgacaattacacagtgttcatcacacaatggtcatctcactgtgaccttcacaagctgtccatcttaaagtgatgatcaaagagtggccactgtgactatcacagagtcactgtcacatggttgccatctggtagtttgaatataattggcccccataatctcatagggaatagcactattaggaggggtgactctgttggagtaggtatggccttggaaaaagtgtgtcactgtgggggtggagagactttgatgtctcatgtatgctcaatccatgcccattgtctcagttcacttcctgttgcctgtggatcaagatgtaggacctcagctccttccccagtaccatgtctgccttcatgctggtgtgtattgccttgatgataatggactaaacctctgaactgtaagacaccccaattaaatgttttcctttgtaaaagttgccatagccatggtgtctcttcacagcaatagaaaccttatcatacaatgaccatcacacagagaccagcaaacagtgaccatcacatagtggccaccacattgtgtacatcatacagtggtcatcatgtattgaccattgaacagttaccattgtaaccatcaaaatgtggccatcaaactattaccatcatatagtggccatcacaaagtaaccgtcacacaatggcctcattctatggtaatcatatggtgaccatcacagagtggtcattacatggtggtcataacacagtggatgtcacacagtgaccaccaaacagtggctgttacccagacattatcacactgtggcctccatatggtggccgtaacagtctgaccttcacacagtggcaatcacacaatttggagggtttttttttaaaccataatttaatgtatatataaatataccatgtatgcaacatgtattcttttttaaattttattttcacatgtatgggcactttgcattcctgtatgtctgtgcaccacttgcatgcctggtgcggatcccctggaactggagttacagacagttatgacctggagtttgtatgctgggaatcaagcctgcatcttctgggaaaatgcttttaactgtgagtcatctctccagcccttaacaatacattctttagacagcttcacaggaatattttaccagactagagaacaaatcactgtagtcagtaagtatagggtggagagaggaatcctgaaagtctgatagcttcctgctaaaagactacacttcccagcttcccttgtgggctatggaactcattcccacccctatgagaggccgctttccatcttcagtaggcatattgaccatcctcacacttggatgacaaaagtggcccctcagtgtgaataaacactgtcaggcctaaggtcagaccatgcctctttctctctgccttctgtctctctccaactgccttttcataaaccaacatgcagtgccagagactgggaacatccaagtgatctctttggcagttgactttatgtctgcagagtcatcaaatgagtctatagagtgatgtcctaagccctcagattcttcaggagatgatgtaaatgaaagagattctctccaacctgggctcacctgtagtgctttgagaatataaccaagtgtccacccagatggagagctccaaggtcaattggtacaccctcaccttgaagcctacaaagaatataagggctttggtggtgaagtaaagtgcctgagtgaaaaagatccatcattgttctccaggagctgggcgatgcttgtagatgttttccaagaagttccaaaagccagtattgattgaaactcatttaattggcttgctttacaaattatgcctctaaacaaccagtctatttttacatttaataatgttaagaaacatgctaactgctgtcagtatgtggcaacctagagatttatccattgataggaggattaaagaattggctttagcctttgttaattcagtctatgttacttgtatattattttttttttacagagttgacataactgggtgcttttgtctttcatccgttggctgagtgtatagaatgcaaatgttatagagaagtttgtaaaggttctgttaagagttaatttttaaaagctttgtaaaataaatcatttacttttgacaaggtagtcctgtctctgggaatatatttttaaattcgaagttgaaaagtattttggggaggggaacagaacttagaatcctaaggtcctttagaatcaaattgtctctttacatagcctgacaatataaaatatattgactgtaacaatttgccttttaatactctaataatgcttatcattggtggactgggtcaattacagtgataacaggataccatatgaggattcttcaatagaatatatattatataacatgttatataatatgcatatatatatatatatatatcttgtaagagtatacttattaacattagattggcgtacacagtcaaatgttaattggtcccacagcagcaatctgtagatgggagagtcaaagaaactgactcagttcaggaagtaggaagctcaagaggaccaatgatacaaggctaaaggcctgaaggtccccaggagaaactctgctgtaagtccatggacaacagcagcagaaagtgtacccacctactcaaggatgggaagtgggcgtgtagacacccctttctttttcttacttgtcccatcagacgaccagtctactgggtggtgccacctatgtcttcccactcggttcactaacccatacaacaatccactcgggaaagactcactgacagtctccagagaatgctttacccacccgtaagtgctcctcaatccagtaaagttgacagcccaagctagccattactaggatctgctattaaaaactaaatcagttctgtgtgaacatgtctggcagaatctcccaagatgcactgctgcctagaggttgcagaagcaaagagaacctactgtgctgtcatttgcaaggggaaagaggcatactggacactgagtgagtgtgtgtataaaatacggctgatggctgatgggatacccaactgagaaagagaaccaggaagatgttccatttgtacagtgtcttagagcaggttgcccagctttgccaatcccaggaaaaacatttccatttcatttcattgctcagtgactaagccaaccctgactgcagggaatggaaggtgattcttctttgtaatgagaggaatgtgaccctcacattgcagacagacctgctgggcaggagattattgtggctgtcctctttgcaaaataccttccactgaggacttcttattccgacttctgctcacatgagaacacacagagattcagattggccgtgtctatatttgtttgcacactggctggttactaacctctgtgtccctaagagagaccaacccactcatcaacagaaccacattctggagttttctgtatctcctgtttgttttcactgcttttcagacttacacatcagacttcctgcttgtaaaccattcctggctaaaaagtgaaactctgagatgatggattaatgacataaatgaggaatggcattaaaataaaaaaagaggattttcaaggctagcagagacatgtgaaagtgtgtgtgtgtgagtgtgtgtattagtgtgtgtgtgtatgtgtgtgagtgtgttagtgtgtgtgtgcatgagtgtgtatgtgtatgtgagtgtgtatgagtgtgcgtgtgtgtgtgtgtgtttgaatgcttttaaaaagagtttagccaggtatggtggctcacacctttaatgctagaactcaggatgcagagacaggtggaaatccatggatttgaggccagcctgatccacacagtgggttacaggctagccaaagttctatcgcagggcagcaacaaaagaaaagagtttagtaatgtgacaaatttgagttttgtaaatttagatgctcagggcctgatttgtgatgttttctcagtgccgtgggccatattcattctgttttaactaccagtgaaaaataccaagctctctgatagtttttatctattgaaaatattttttcatatagtgcattctgttcgcagcctgcccccatctccttctagattcaccccagttctccatgtattcaattccacaacttctttttctctctatttagaaaacaaacaggccaataaaaaaacgcaaaccagaataaaacaaaatagacagagaaaagaaaacagaaaatataaaaaggagaaaatataagaaacacattcacacaaatgcacacacatacaactcataaaaacacaaaattgaaaaccatactatacaagcaaaagacaaggaaagtaaaaaatgcctgaacaaagaaagcaagcactatgagacaaaacatctccaaaaagaccattgagttccttttgtgttgggcatctactgctgggcacggagcctgcccttaagtgtggttcacataaccactgagactccattggagataagggatttgtgcctcgtgagtggttgtcaattggagatcacttctgggtgggagtagggctcaagtccatgtcccatctcaatgttggaactccatctggctgggacctgtgcaggccctgtgcagctaccatggtctcagtggttcatatgcatgtcagtactgttgctgatggaaggcaccatttctttggtgtctttcatccccactggctctcacaatcctgcatcatcttctacatagtttcctgaggcctaaaaaaaaaataatttttaaatgtcatgagctttgaggacatggaaaaacagtaatgtccaagattgtaaagaacctttccccaatattaattgactctatatgtgactctgtggcacaggatgaggagaggagagacagaggtagacactgctctgcatggtaggaccacatccatgtgtggtaggaacgaatccattgccatcatccctagaattggaaaacaatgaagtcaaaagggtgtagatagcctggctagggtctcaagtaattagcctgtgggctcagctttgcccctagattgtagaggtatacagagtctgagttcggagctaagttaccgaggaactagacatgttgatatcccacccaagccagacatcatcacatgcctgatctgtacatctagatcagaatcaggcaaatgccaggaagaggggtgagtggactcagaaaaccctgcatactcagctctgtgctttcagggagccaaggatgaagaccacaaaagagtctaagcaaatatgaggcaacttgcagtactcgccaacatcttcacaaagacttccaacaaaagagaacaaacagtatattaaaaagtgttttggaacactgcactggagcatgaactacctctaagaggctctaagaagagcctctacctctgtgaatgcctagtataacgcatttggggagggggagattgaagggagtcacagtagcaggaattatgaagttttatttatttaatatgtctaactatgttggcaaactgttaatattagcctcacggtaaaaagacagggtagttggctcatagcataccactgtagctatcccagtgttgttgaaaatgaaaacaataacaccgcatttagacatttctttgtttcgagaatggcatgaaccatcaaggtaaggacttctctgtgtgaatcctacctatttagactttcccctgactcaggcttcccaaggtcctggcaaggggtggggcctccatgttctaggtgattaatctcaaaagtgggaagggaagtatttgacttaatagcagatgcaggacggtgatctgtttccttcacttgtttttgaactgctcttccatgaagggcatgtacttgtccacagggcatctgcccgtgttcacttacagtgggctggtcaggtggtttccagcatgttctgacaaactttagtcttttctccttattgacctttgagatagcttgagagaactggaatataggtcccagccaccctggataggcacaaggcacaactttgggtcccttccagctcccttctggaagggatgggtatgcagtgagcatcagcttgctttggtcctcaaggattcatgttacatgtacagcagttgtccatggcaggacagctacactgaacgactcacagctatagtaagtttagctctcagctcttgagtcaggcccagatgaattacctggaggttcagggaagaatatgtctgagtttcttcagactgttggcagaattcattacccaacagatcttggattggggccctttttaatctagcagcacccagcctttctcatacaaccctccacagctggaggccagcacacactttcctgccttccctttcagctttatacttctgtctcaggtcatagaaagttctctggtttctatgtgattaaatatcactcacacacacacacacacacacacacacacacacacacacacacactcatgggagtgggtaaataagggagtatcttagtgcttctgtggtgtttgaatgaggaaacatgccacttgagggacaccaacagtccccttcccaccctgacctcacagactggaagacaatctggccaacaattgccattaggcccgatggatccagaaccctggaggagaggagaaaggccttcctgagaagggccgtttctcccaaagggagctggcctcttctcccaggctgggcctgttgtgctgatgtgggaggcaatgctcgggccacccagcgtgaactgctgctgcctgagatggaatctactctcctagctgttggcagagacagagggactgaggcccacagctgctctccactcgcagtctgttcccaggctccacatggttctgcaaccctaaatgccaccaagatgcgctcaactaacaaccacaagaactcttggggcggatgccggctggtcttcttggctgttctgaggcacataccctggccgccctggggagcagcaagttcttgcagacatgtgcatgatttgaggtcagtctccggctggatcctaaacagctgccagacttttctgtgcctgatgaaatacgaggaaaagccaaggaattcttcttgcttggagaatattaccagctccaaggaagcaaagtcccccctggaaagggtagagtacataagatggtggatctagaagttttggaaacctttcttgtccagaggcagatgcccaaggttgcactcacacgtgtccttgcaatctgcaacccaatactctgctccttgtcatgcctgacatatgaatccagaccacagttggacaactacaagggcagtgcctttttgtacctttgggagttccagaaagcccaatgaaaattagaattggatcaacaagaatcccgaatatccgagaaatctgcaataccaaacagtgctcatcaaatatcacagtagaagtcttgaagactagcagtcagcactgtggagatgtgtatgtgtgtatgtgtgtgtgagtgtgagtgtgtgtgtgtgtgtgtgtgtgtgtgtgtgtgtgtgtgtgtgtgtatgtatgtagttaggaatgagggagaatgtatcaacatgagggcaaaagtaaaacataaggtgtgtaaattaaaatgaatacacaaaatagtgtcatgctttataaaactctgtgtgtgtgtgtgtgtgtgtgtgtgtgtgtgtgtgtgtatgagcgcacgtgcagtgataagacatattgctgtgattgccttttgggaaaaaagcaatctgtgataggagtagagaaggaagggaatcagggaggaaaagcagaagaggggaagaagccaatgatgatgacggacaaccatggcttgaagaatgcaagcatcctgctctctgttctaggatggaaacaagaatggaaagcaaggctttgtcctaacttctcatccagtgctccgggtgactgactaaggtgtgtgttcagtataggtctgtccttatatccacaggggtgctgaggacttgaggggttgccaggattctggcccgagatgcacatgtgaagaaatctgaaagcctgcaatcctggctcagagctacagaactggggagtcagctccgggttcagaaacaagaggaacagatggaagctgttgggtgaagccgaagtgccatggtgtgaaaagaagccaggattgctggggagtggctgcattggccctgtgaaagcagaagctgatgtagtcatgggtaacatgcccacgcctctgtaaataacaggtcacccgtgctcctgtaaataaccctaattgaaccattggttaacacacacacacacacacatacacacacacacacacacatgctgctacttgggaaaaggaaggagtcagtgggaatgggaggggacaagacagggtaatgcaaatgaatatgattaaaacattatatacatgtgtaaagcatcataatgaaagacattattatatataattagtatgtgctaataatttttttttaaagtccaagagcagaaactttaacgagaggacactgatgaccacaggcacatcttcgtttggtgacaagcagtgtgcctccatgaatgagcatgaagctgacaggctacgtctctcctgtctttgttcctgctctgtggcctctgacctgtggcctgcatgtcacctctcacaatgtgtgcacccatagagatgctgtcattgtttgttcattcttttggctgagcagtgtgactatattttaggaaaactgacttccagtagcttcttcctttaaagccaccatggccaatttcagatcctcacagacactttccagatgctcctgtttgctgctgccgctgtctcactctcgttgccaaggggaggtcacagctgaaggtgcttctcttccggaatctagcgaagttctctgatgcttcttattttccaagttaaaagacaaggaacaaagtccagctccctctgggattttaaactggaagaatgaccaaagaatgacctcagagcatcactctgtcagtgttcaatggtcatgtgaaccaactgacctgtggcagccatgctgtgaggaaggccgtctgtccctcaggaggcacagagaggcacatggctctggcacacctggggactaccctgttacaccacagcaaaatggtcaactctactccatctattatgtgtgcaaattttcaaggttttgctcttaaaaacagtattgtcttgtgacagctccaaacattgttaacaaaaccattaagtgtcagttatggcagccaccaaaaggacttgctactggctcatgactgaagtaatgatgggccccttcaacctgcagtctgcgctgactctggataggaaagatatggtccagggtaccatatataatgttagagcatcctgtcataacagctagagcacaaccaccatggagtatggtgtgtgtcagctttccatcgctgtgacaaaatacatgcgataagcaacttaaaatgtgaaagattatatgcagagataccatggccagcctagacacaggggtgttggggtggagagctgccttggtcctgcctcaactagatgatgggacagacttagtagacttcctatgggaggccttaccctctctatggagcagataggaggagggggaagtgaaggggggtgggaggaaaggagggagggggaactgggattggaatgtaaaaaataaattaataaaaaataataatctcattaaactgctcttcagtgaccaagatcactacaaattaggattactatttacacattactcctaatataatataataatagtgataaaaataatataatgttaaaaaaaaaagttgaaagatttagtttgtgtcactgttttggtctgttttagtccagggttgcttgcttgtattgtttttggtcctgagacaaggcagagctttgtgactgaagagcatgtggaactgacctgctcacacaggtagctgagaaggagagaaaaagagaggaaccaggtacccaacaatccctcccaagcacgcccccaatggcttctttccactgaccctcaccttgtaaagtttccaccaacccccccccaccaccaccaccgaaaagtgacacaggctgatgaccatgccttcaacatacgacctctggctggcatttaagattgaagctataggatgcttttaaatctgttggacacggtatctcaagcagggccctcactgaggccttcacagcccatgtgccaagaagccattttaccagaagcagacttcctccatctttgtagccatctctgccagacacccaggaggtcagtaaatgtctgcaaaagaaaatttgttttgcctgctgtgtctgcttctggacccctcccctctcctctgctaaaagtgaaataatttatggatgcccttttcaacttctctcctgtctgtggccctgaccctctgatcagacctggacacaatctgagtaggagtgtttgaggaaacacatttttattcatgtggcctttggcaaagcacctcgaaaatctagcttgcattgtctaatgcagtccctgcgccttgcttgtcccatgcctttgctgggagactttcaggttggctggcagaattcaaccaaggggagcagagacaaagttgaagagggctgaaggggtggataactagttaaccattcacctccctcccatgaaggagagaaatgagctgctctctccaccacccacctgtgcctcagcacctgtgctcctgattcaataccattatcatacttgaaacttaataatcattctataatattacttgataaccatgtcatattacaacattcccagatgggactggagaagggactcagtagttaagaccatgtggtggtttgaatgagaatggttcccttgggctcagatttttgaatgcttgttcagaagttggttgaactgtttggggaggattaggaggtgtggccttgttggaggaggtgtgtcattggcggtgggcttgaggtttcaaaaactcatgccatttaaagttagagtttttctctctttttcccaggcctgtggatagaatgtaagctcttagctactactccagcaccatgcctgcctgcctgtctgtctgttgccatgttcctgtcatgatggtcatggactcaccctctggaaccttgagacccatatgaaatgctttattttataagttttactagtcatggtgtctgctcacagcaaatgagaagtaactaagacagagcacatactgctcttgcagagacctgagtttgattcccagcaccaattttgattcacagctgtctataacttcagatccaagccatctctttcctctgtcctcggagggaacaggcattcaaatgcaaatactcactctcagatgcatagttaaaaaataataaaatgaatcttttaaaaaaaaatcctaagcaaccctaaatggcttctgtagctttgtttgtaccaaatcaacatgcagttggggaccacacattgcattttgttattttcccttggtctatcagtttcttttttaattaagcaaaatcaatgttcaatgcaatgaagtaattttaaatgtatggtttggcaaacttaaaactttttatcacctttattactaccaccctccccaaaaatataggaaaagtctttcattttctttttataacctaccactccctctctttccccaactcctagcttgggaaaactctgtctttgcccaccttagatagctttgccagctcagaaactgcattagtacaggagtacaagaggagaagaagaagaagaagaagaagaagaagaagaagaagaagaagaagaagaagaagaagaagaagaagaagaagaagaagaagaagaagaagaagaagaagaagaggaagaagaagaggaagaagaagagaacaagaagatgggaagacgacaatataagaacacatccaacaacaggaaaaccaatatgacaccaccagagtctagggactctacaccagcaagacatgaacatcccaacacagaagaagcagatgagagcaaccttaaaaacaacttcatgcagatgatagagaacctaagagaggaaatcagaaaatgctttagaaaaatggaggaaaagacaaaccaaaagatgcaagaaatcaaggaaagccaaaaaaagccaagaaaatacaattaaacagctgaaggaaacagttctggacctgaaaaatgaattagagacaataaagaaaacacaaactgaggaaatactggaagtggaaaagctgagtaaacaatcaggaaccacagatgcaagcataacaaatagaatactcttctgagatggaagacagaatctcagatgctgaagacaaactagaggaaataaactcatcaagcaaagaaaatctgaagtctaacaaatccataacacaaaacatccaggaaatatgggacaccgtgaaaagaccaaacctaaggataataattatagaagaaggtgaaaaaaaacccaactcaaaggtgcagaaaacatattcaacaaaatcatagaagaaaacttccccaacctaaagaaagacatgccaatgaaaatacaagaatcctacagaacaccaaatagagtgaaccacaaaagaaattcccctcatcacataataattaaaacaccaaacgtacagaataaagaaaaaatattaagggcagcaaggaaaaaaggacaagtaacatataagtgcaaacctatcagaattacaccagacttctccatggaaactccgaaagctagaaggacctggatagatattctaccaactctgagagaacatggatgccagcccagactactatacccagcaaagctttcaatcactataaatggagaaaacaagatattccacgacaaaaccagatttaaacaatatgtaaccactaatccagccctacagaaagtactggaaggaaaactccagcctaaggaaattaactacactcaatagataatcccactcaacaaaaacacaaaataaaaggcagggtaaatccacatacaataccagtaccaacaacaaaccaaaaacaaacaagaataaactctccatagacattaatttccctcaatattaatggtcttaactcgcctataacgacatacccaaacttatgggacactttaaaagcagtactaagaggaaagttcatagttctaatgttcaacatgaagaaactagagaatagccacaccagagatttgacatcacagctnnnnnnnnnnnnnnnnnnnnnnnnnnnnnnnnnnnnnnnnnnnnnnnnnnnnnnnnnnnnnnnnnnnnnnnnnnnnnnnnnnnnnnnnnnnnnnnnnnnnnnnnnnnnnnnnnnnnnnnnnnnnnnnnnnnnnnnnnnnnnnnnnnnnnnnnnnnnnnnnnnnnnnnnnnnnnnnnnnnnnnnnnnnnnnnnnnnnnnnnnnnnnnnnnnnnnnnnnnnnnnnnnnnnnnnnnnnnnnnnnnnnnnnnnnnnnnnnnnnnnnnnnnnnnnnnnnnnnnnnnnnnnnnnnnnnnnnnnnnnnnnnnnnnnnnnnnnnnnnnnnnnnnnnnnnnnnnnnnnnnnnnnnnnnnnnnnnnnnnnnnnnnnnnnnnnnnnnnnnnnnnnnnnnnnnnnnnnnnnnnnnnnnnnnnnnnnnnnnnnnnnnnnnnnnnnnnnnnnnnnnnnnnnnnnnnnnnnnnnnnnnnnnnnnnnnnnnnnnnnnnnnnnnnnnnnnnnnnnnnnnnnnnnnnnnnnnnnnnnnnnnnnnnnnnnnnnnnnnnnnnnnnnnnnnnnnnnnnnnnnnnnnnnnnnnnnnnnnnnnnnnnnnnnnnnnnnnnnnnnnnnnnnnnnnnnnnnnnnnnnnnnnnnnnnnnnnnnnnnnnnnnnnnnnnnnnnnnnnnnnnnnnnnnnnnnnnnnnnnnnnnnnnnnnnnnnnnnnnnnnnnnnnnnnnnnnnnnnnnnnnnnnnnnnnnnnnnnnnnnnnnnnnnnnnnnnnnnnnnnnnnnnnnnnnnnnnnnnnnnnnnnnnnnnnnnnnnnnnnnnnnnnnnnnnnnnnnnnnnnnnnnnnnnnnnnnnnnnnnnnnnnnnnnnnnnnnnnnnnnnnnnnnnnnnnnnnnnnnnnnnnnnnnnnnnnnnnnnnnnnnnnnnnnnnnnnnnnnnnnnnnnnnnnnnnnnnnnnnnnnnnnnnnnnnnnnnnnnnnnnnnnnnnnnnnnnnnnnnnnnnnnnnnnnnnnnnnnnnnnnnnnnnnnnnnnnnnnnnnnnnnnnnnnnnnnnnnnnnnnnnnnnnnnnnnnnnnnnnnnnnnnnnnnnnnnnnnnnnnnnnnnnnnnnnnnnnnnnnnnnnnnnnnnnnnnnnnnnnnnnnnnnnnnnnnnnnnnnnnnnnnnnnnnnnnnnnnnnnnnnnnnnnaaattaaatggagagaaactcgatccaattcctctaaaatcggggacaagacaaggctgtccactctctccatacctcttcaatattgtccttgaagtcctagctagagcaataagacaacaaaaggagatgaagggaatacaaatcagaaaggaagaagtcaaactctcactatttgcagacaatatgataatctacattagtgacctgaaaaactgtaccagggactcctacagctgataaacaccttcagcaaagtggcaggacacaagattaactcaaaaaactccgtagccctactatacaccgatgacacattggtggagaatgaaagcagagaaacatccaccgtttacaattgccacaaacaacataaaataccttggggtaacactaaccaaaaatgtgaaagacctgtaccataagaattttgagtatnnnnnnnnnnnnnnnnnnnnnnnnnnnnnnnnnnnnnnnnnnnnnnnnnnnnnnnnnnnnnnnnnnnnnnnnnnnnnnnnnnnnnnnnnnnnnnnnnnnnnnnnnnngcagcaattttagattcctctattgagaattttttattttgttctgtaccccactttttaattggattatttggtattttggaaactatcttcttgagttctttgtaaattttggagagcaccatcccagacttcaagctctattatagagatagtcctgaaaacagtttggcattagcacaaaaatagactagtagactaatggaatagaattaaaaaccctgatattatcccacacacctatgaacacctgatttttgacaaacaatccaaatttatacgatggaacaaagagaacatcttcaacaaatggtgctggcataactggttgannnnnnnnnnnnnnnnnnnnnnnnnnnnnnnnnnnnnnnnnnnnnnnnnnnnnnnnnnnnnnnnnnnnnnnnnnnnnnnnnnnnnnnnnnnnnnnnnnnnnnnnnnnnnnnnnnnnnnnnnnnnnnnnnnnnnnnnnnnnngcttcctgaacataacaccagtagcacagacactgagatcaacaattgataaatgggacctcctgaaactgagaagattctataaggcaaaggagataatcagcaagacaaaacagcagcccacagactgggaaaagatattcatcaatcccacatctgacagagggctgatctgcaaaatatagagagaactcaagaagctagtctccaaaacaccaaataatccaattaaaaagtggggtacagaactaaatagataattctcaatagaggaatctaaaatggctgaaagacacataagaaagagttcaacatccttagccatcagggaaatgcaaatcaaaacaactctgagataccatcttactcctgtcagaatcgcaaaaatcaaaaacaccaatgacagttcatgttggagaggatgtggagaaaggggaacacttcttcactgctggtgggagtgccaacttgtacagccactttgggaatcagtatggcaactcctcaaaaaaaaaaaatgggaatgagtctaccacaagatccagcaattccactcttaggcatatacccaaaagaagcacattcatacaannnnnnnnnnnnnnnnnnnnnnnnttcaacggaagaatggatagagaaattgtggtacatttacacaatggagtactactcagcggaaaaaacaatggaatcatgaaatttgtaggaaaatggatggatctagaagaaaccattctgagcaaggtannnnnnnnnnnnnnnnnnnnnnnnnnnnnnnnnnnnnnncagattttagacatagagtaaggattaccagcctacaatccacactgccaaagaagctaataaacatggaggaccctaagagagacatacatggtcccatggagaaggggagaagttcaagatctgctgagcaaattgggagcatggggaagaggggggagggagctaggagaatgagaaagggagtggaagagggatgccaaggacatgagggagcagaaaggttgagtcaggggaagaatacannnnnnnnnnnnnnnnnnnnnnnnnnnnnnnnnnnnnnnnnnnnnnnnnnnnnnnnnnnnnnnnnnnnnnnnnnnnnnnnnnnnnnnnnnnnnnnnnnnnnnnnnnnnnnnnnnnnnnnnnnnnnnnnnnnnnnnnnnnnnnnnnnnnnnnnnnnnnnnnnnnnnnnnnnnnnnnnnnnnnnnnnnnnnnnnnnnnnnnnnnnnnnnnnnnnnnnnnnnnnnnnnnnnnnnnnnnnnnnnnnnnnnnnnnnnnnnnnnnnnnnnnnnnnnnnnnnnnnnnnnnnnnnnnnnnnnnnnnnnnnnnnnnnnnnnnnnnnnnnnnnnnnnnnnnnnnnnnnnnnnnnnnnnnnnnnnnnnnnnnnnnnnnnnnnnnnnnnnnnnnnnnnnnnnnnnnnnnnnnnnnnnnnnnnnnnnnnnnnnnnnnnnnnnnnnnnnnnnnnnnnnnnnnnnnnnnnnnnnnnnnnnnnnnnnnngactctgatgacaccctatggaaggcctcaccatccagggggagcagaaaagatatgtgacagataaggttttagttggggagggtgggtaggggaggacgggtgggagaagggaactgggattgtcatgtataacaatcctgtttctaattcaaataaaaaaaaagttggaaaaaaattgcaagatttctgaattatgtaagtgtatgtttgttaaagagcacacacacacacacaagcaagaggagggcctctgtgggaaaggggagcagcaaaagtgggagcagggcagaggtctgaaagatagaacacgatgtggcacatatctttaatgccaggatggacagtcagggacgagtggggctctcggagttcaagcaacatcagcctgatgtgtgtaataggctccaactgtgctcaagagatatgtattcatctataaaaatctatgtgtatgtaagaggagcggtgaaacccattactctacatactaatttaaaattaacttttaaaaggagagggctggagatatgactcaacagttacagcatgtactgctcttgcagagaacccaagtttggttcatagcacccaatgtcaggtgactcacaactgcctgtaactccagctccaagaacataagaggcctgtggtctctatgggcacctgcacccatatgcccgtactcacacacggagacacagacacagacccagacagacagacacacacacacacacacacacacacacacacacacttataaaaataaaatctttttaaattgataaaaagaatatatatgattaacatgttcatttttactactgaaaacaatatttttatttatttcagtttgcaatcatatgtgccaatagatagataatagatacttgatttatatatatcagctttatctccttcaggttcactcttgtgctattttttttttttgctactgtaataaaacacatgcattgatacttcttaaagcaaaagtttacttagctgcaaatcctggaggtgcttcattggtttctggttagggtcttactgatatcacatgatgggaacacatgagagaggtcacatgatgatgaaattgagctgagaacaccaaacccagtctgctctgacagtgaccaatttagttccaaaggctcctgaactcactccagcatagttactaatctgttccaatggttatagaccaataacctaatcacctatcattacccactgctattatactgaggaacaagcctccaacactagagtcattgagaggcatggttactttgcttcttgctgtgaccaaatgcttgtcaagaagcaatgtaaggcaggaaggatttgttgtggctcacagtttgctgggatacagctcatgagggaagagaagggaaggtgtggctttagggagtggcctgtggttatgatggtaagagctgacagcacagtctgctcacattttggagggccaacccagaagcagatggtgacttgggtaggagtcagagtcagggtacagccctcaaagcctgcacttgcactatgtgcagaatcccacttccttaagcaagactccactccccagtttcccccgccaatgctacttagctggagactaagtgaatagcaggatcaagatttagtaggatttttttttaatttatttattagttctagttagggaacaagcttgtttcacatgtaagtcccttctccctctccctcccctcaccccatccctcttcccccacccccaccctactccccatcccatccacccaccactccccaggcaggatagggccctcaacgggggctctgcaaagtccaccaaatcttcctgtgctggttctgggcccttccccatgtgtccagggccagagtgtaacgcttcacgtgggatgggctctcaaagtcccttcttgcaccagggaaaaatgatttagtaggattttaatagaattcctgagattttatatgtttaaaaccatgctctatggttttctaatgtgaatatttttgcttcttttttactggcccttaagactattaaactgggtgggtgagagtagactttctttccctgccttgacctggagcagaaacattcagtctttcactaaagagtgtgatgctaaaggtttggggaacccatctctctctctgaactatttcctgagcagtagtctatcagattctcagtctttcccaggtgagtcagccattgttgaagtgcccagaccacattctgtaaatcactcttaaaaaatcccttttctgttcctttagagtagtggttctcaaccagtggtcccaactcctttggctcaaaggctttggaggtctaatgaccctttgacaggggtagcatgtcggatatctacattactattcataacagcagcaaaatcacagttatgaagtagcaatgaaatcattttatggttgggggtcagcataacactagggactgtattaaagggcattgggaaggttgagaaccactgccctggagagcctcattgcttctgctctgtcaccacacacctaagtcattattgctcagatacacaaaggctgccacagacaacagcaagcttgtgagcggggctctttttgatcaaaactttatttgtatagacaaacaactgacctgccagccatagctcaccagctccttctctggaacaatacccttgcccatttgttccctacagattgactttttcaggactccaagcttggtgtcatatttaatcaccccaattctgaattaagctaattgtattcttaagatgatatgtaatgtgtttctttatctctgtgttgagacattaagcattttggagcaaggtaggactactaaatcttgaaggactgtcactaaagttaatgtgactgagtgttgaacgtgaattatctattcagctgtctatcatccatttgccaagtgcattgttgcaccctctgctatgcatgttggtcaatgatcgaagagacatgtcatatgatctaacttgcccttgtagtgaggtaagcccaccagagatcaccacctggacattcagctaaaaagaaagactttattgctcaccagcaatagtacagggaacttccccaagtcatgcagaccagagtcctatagacctttgtcttgtaatgcaaaaccacagcctggctgtcatacctcagttaccaagaagcagaactattgaaggcaaaaagcaaggttagtacatttaaggtcttcctggaactatggaccacgtctttgatgaattaggtctttgttctggttttggcaggtattagggttttaaggtcagagcagtgcctcaacatggcatcagttgcgctcaggtgtggggcttgttacatcttcagtacactgaggcagggatggtcgggtgtcacaaaatcatggtgctcattgtatctagaccactttttagggtacaggttttctagctctgtgggctagaaaggacattgtaaacaagtatgataaaagtcagatccctagagaggtagaccggcctccgaggccaagcttgggtcagtaagccctttgctttcaagaagaaaagcatactggcttcagggtctgtggtgacttaaaaatgtgtccttaaattccttgtgacatctgccttctaaaggtaaggctaactcttcctgtatatgagctggatttcagctgcttctaatgtctgtagaggaagaccagatcataaaaagcaaagcagcatccccctttctctctctaaagcctccacctctgcaggaaatcagacatcatgtgaagacatcccaatgaaggtctacctggaatggaatggagactcctcaccagccagcatcaacttgccaactgtgtgagtatcttcaggctgctatgacaaacacagccagactggcggcttttttccagttctgaagtctgagaagagcataattaaggtgctagaaacttcaatatctggtcagaacttccttcctggaccacagatggatgactttatgtcttcatataataggagaggtgaaggagctcccaccctcatgacctgatacctttcaaaggtgatagtctgatccatatgtcatcacgttgtagattagagtccaataagtgaaattatggaggaatacactgagtcaaagcatcttggaagcaggcctctggccccactcacaccttcagacaaccacagtcttggctgacatctctcacaccctcatgaactaactacacagacaagcagcccctgaattcctgaaatgcgagagataacagagcctacctccttaaggccttctttggggagcaattttcactcaacaatagctagataagggggactttgcaccctgttggatcacatggagagcttcacccctccatttgtggcatctaacttgagacaacacaagcagaagctctcctcccttcctgctgggcacatgtgtctctctgatggctgctgacctcatagagaaattcccatgcaaaacttagcactgaacccctaaagaacgacaacctgggacacccacccccagggcgaactacatttggagatgacgccactgcctgtccctccccacagaagatccttttgagacttctgtctgaatgtgaggcagctgggctgccacactacttgctagaggaacagctttccccatgcagccaacagcacatgtggctgtgcaagctgcaatcttttttccattaacaccatgttccattgaaaacggaggactggccaagattccaaaaacactaaagtggtggattgttgccaaaatactccaattgattcaatgggacctttagggaaaagttagatattaggacctcactagcaaaagctagagaaaattttaagaaggggaggcatcctatatttccctatggtttgattttcatttggtttctatataaattagaatataaatatacattagagtggctttgcttgcatcgggaaagatttagactctagtcttttaaacattgtactataacttaataaacaaaagtagactatcaacaagcagttcataggacaacagagtcaaacagcttttaacactgaaaaagatgctcagtctcatggtagttaaagaattgtaaattaaaactctcttgaattctggcctcttgatggtaaaattggcagaaacttgaagccatgagaaagctagcatttgtccatgtttctagtaaagatacaaaaacggccctcatggggctggagaggcagctcagcagttaagagcactggctgctcttccagaggacctgagttcaattcccagcacccacatggtgactcatgaccatctataatatgatatgatgccctcttctggcatgcaggtatatgtgcagagcacccatacataaactataaataaaatttaaaaattatttttaaaaaatatggccctcagcttccaagagtactagatgttcttgaagaggacctgagtttggttcccagcaccccatggtggctcctaaactataactccagttcccagggattcaacaccctcttctgatctccacaagaacccacatacacaaggtccacatacaccttcaataagtaaatctttttaaacaatgcctgtctcaaggagaagttgaggacatctaacagaatgatatgtgcattgaccctttaagataacaacagtgcttctagagatttacactgaatccacacttccccaaatgaaacaacatacatgtgaggctgtttgtgctgacactgtgtgtaatataaaagatcagaaacaacttcaatgcattagagtatcatggaaaagtcatggaatagtcacacaatggggtgactatactgtcatgcaaaagaaacaggaatgtatgtggaatgatggctaggagatactgccagattaaaaagaaaatttcagagcaatgtttatgtatacatgtgtgtttccaaatgaaacacagaaaaaaaaatccatgtgaaagtaataaaatactgatggcctattggagggcaggtgtgggacagagaagggaacagccaaagactacatgtcctcctctctgtgtagtataaaatgaatccaaaccccaaaattaaccttaaattttaatataaataggaccaaatgactctaattgtatgtcatattagtaaaatggctctgcaggtgcttgtcaccaagtctggccatctgagtttgatcctcaagacatcatggggaccatccccaggtccacatggcaggaagagagaagcaattagagcaagctgtccctggcctctgtggggcatgatagacacagccacacccatccacacacctccacacagacagaatgtgtgtgtgtgtgtgtgtgtgtgtgtgtgtgtgtgtgtgtgtgtgtgtgtgtgttcaaaggaaacaggatgtttagacattaaaaagcaaagaagaaataatgactgaaatgctttggggtatactacttttactatatgaatgtagtaagatatttgttctttctctctctctctcacacacacacagagtgctctctctctctctctctcacacacacacacacagagagagagagggagagagagagagagagagagagagagagagagaaacagaggattcctaattaggaaaagcttcatctccatcctcttcctccactttgctcctcccagggaacttgagctggctgcagcatgcttgatactccaggaatgccaggtatgcgagatcaatcccaggagggcttctgggcaaccatgcatggttcccctcaagtcagctcacctcctcctgcccaccacctccgcagtgtgcttcatgacttcaccctgctcattgctgttgtgtgggaggcccaggatgagggtacagccagcaaaacccaacccagctcatcaggaaaactcactggcctgattcatcagagtctgctggggacagacaggaagaaccctgcctggggcctttccatgctgtgttgaacatgggcagcctcaagctgttttcacttgacaaacatcatgggtacccattgatctagctcttggtctcctaagagacacacaagcaaagataaaatgacacaccctccttaggagatgagcccaggatttcctacccgggaggctgaaacaaggagatagtgggaagcctgcagcaacgataggggccacctctgaccccacagacctcccccccacctcaaggtccctcagcaccagctgggaaatgtaagcatggactccccagaagccggagaaggcagctggaggcagatgtctctgctgtttctctgtggagtcctgtgtccagcatttcctaggtgataaacatggcttgtctagaagtttggattcagtggatggaaggacttcacatccagcagctgttctagctggttcttgccatccgagaaattgggggaccactgtgcagactgctttcgttttagtaccaaaggtatcttgtctcctgttctgtcccttcctgaggtccactcagaagagacaggcccctttggcctgagccccctgtgccacacacactcagcaaaacaatggtcacgcccacaggaggacatcaagagaccaccataactcttcctgtctcattcaccaccccacttacttgcctcacccagaggtgactctccttctctgagcacctgcttcccttggcttctcccattcttcttccctcagttgttgaaatgccaaagggaattacgagctaaaatttgcagaattgattggctggaatccatttcagcagtcccagaggaaggcaatgagctcacaagaagctctacagaggcagcatggtggtgcttcccaccatgagtgggtcattccaccctgatttctccaacctcattgtaatttttttgtagtgttttctcccagaaccataagcatagactctgaagtaagatctctgtgttagttgttttcattttgtaacccgaggcaggcttccttaaaaggaaaagaggtttatttagctcacagtctggggacctaagcatggtccaggctctagtgaggcccctactgatttcattgtgacagattgtctatgtttttctctgtgcatctgtgtctggtctctgtcccacctcttagaaagccaccaaaattcaatcatgcagctccaccctgatggccttactaaatctagtgccttcctaggcctggccttcacacattttgaagttacagtatgtccttaccctttaaaaatggtgtgtgtactttatttacttatatttttaattatatatgtgcatgtataatgtaattatcggcagggatgcacgtgtactttcatgtatatggatggaagtcagagaacagcccttaggaactggctttctaactctaccatgcagattcagggagctaaattcaggtcctaacctcatcggcaagcccctttacccactgaaccatcttgccagccccagttcctacctcccaaagccattaatccatggcttacaggagtaagctcctggctgaatttggaaagcaaaccatagaaccctgtatgcttgttcggctggtgatgcttggtgtacaaaatcaagtacatgtggaaaagtacacgtcccttctgacagaatcatcctagctctaaaatgtcccaggtatcacccctctcctccagctctgtgacctgcagcatgcaacctctttgggactaattgtactccaagtttgcccctctcctcagccaatgtcctgcagctgtggcacccccagcattactggagtcactaccaacacccaggctttaccttcacaacatcacacaatggcctcctgaggcctccttgtaggtatccagaccccaccacacattttctggcttcagttgcactctgaaactatggagcaagtctcccgtgcccctcgagcctatatctttcacacctccagagagagctgcacatggaccatgctgctgagtgctgctccagcttgcaatggaggctctcgagtatgcagtttcacccccaggacagtttccattcccccagggcagtgcaggagatgaatctctggtgatgagtctagtttctcagttacagatgaaaaactggtttctcagttacagctactcctgaaaggatgctgccttgaaacatccttgtaaataaatccatcatctttaaatctgtctttgctcaggttcttaagatggaagcacaatgaagccatactcttggccaaaattcctcaatggccccttgcctagctgctgggagaggccctgttccctctgaaaggttgacaggcaggcctccagtctgcatttctctcagcacctttctttcaagctcccaccaggagctggagagatggctcagaggtaaagagcactggctgctcttccagaggtcctgagttcaattcccagcacttacattgtggctcaagctctcaccaggagctggagagatggctcagaggttaagagcaatggctgctcttccagaggacccaagttgaattcccagcaacaacatggtgggtcaagcttgttaagctctgctccagcacaccaaggctttcctgacactgattatcaagttctgctacattccaggcacaaaacagtttgagaggccaaagaatcacatgttcagattcctcacctcatatcaacttctgtcttagcttcttttcctgtgataaaattgtctcatgaaagtaactgaagggagaaagggtgtatttagcttatagttccactcgctgcggcaggaggcagcagctgctgatcatttcatccatagccaggaaacagatggtgatgtgtgtccatgttcagctcactctcaccctttcattccattcagagcccagcccaggaaccgatgccatccatattcccggtgagtgttcttacctagattgacccaattaagacaatccctcacagacaggcccacaggccaagcttatctagacagcccctcattaagagccccttctcaggtgactccagatcctgccaagttgacaattgaaatcatccatcaccatactcaacatcattagtcgttaggaaaatgcaaatcaaagccacaatgaaatgctactgtatgtcatgtaggaaaagttgtaatttattaaagaaaacaagtgttggtaaggatatagaaaagctcaaatacttgctagcagtaacatgaagtggtatttcagtggataaatggataaacataccatggtatatccatacctctgtgtgtgtgtgtgtgtgtgtgtgtgtgtgtgtgtgcgcgcgcgcgcgcgcgcgcgcgcgcgcgtgtcccttgtctataaactacccgcccggcaagccctgcaagccagggagaggtatggaatccataccataaaaaaaggaatgaagtagtgatatatgctacaacatggataaacctcaaaatatactaaacaaaaacagtgaaatataggagattgtattgtatgaaatatccaaagcaggtaaattcagaatgtctggaagcagcttgggagttgtgggaagctgggagtgaggatgtgatggggaataatgggaattttggcttagtgagcatgggcctttgttctaaggaactggaaggaagtggtggttaggaaaatgtagggtatggactaaatgttaatgagttttcactttaaagcagttcatttgggctagagatacagtcattgctagatcacttgcataacatgcacaaggcccaggggtcagtcctctgcaccagaaatatatatactcactatatatgtagatatcattttgccacaaaatgatctattttgtagtgcaaatattggcccaattaaaaaaggggggaaggagagtagatagttctgaattgcctgaagccctgagtaggttcttggaaggtgtcacctggatccgaaccttaacaaagaaatcaaaaaggaaggacatggctgctcctaggtatggtggaggagaaagtttactgtagacaaaatgcagaacatagtcaaaggcggagacatctgggagagtccagagtgaatatgaccctgatccaggccatgtgaggagtgcagggaggaggatggaggagagagccaggaaaataaaggtagaccaaagggcgggcaactaaaatggttgattctgtagggaagggcaggccagcctctggggtgcagagttcagggtagagcagctgtgccagccatagcctgtagggactgagggatgctgggagaacctggcagccaggtccacttttatttgttaaataagcacctcagttagctgtttgtcccaggtttgagaaccaacatctgtgacattatccaacccagctctccctccagccattgcagatctgcagtaacatgtgcacatatggcccacctccgctggaaggtcatagcctctggcttcattcccccagccattgaagaccacaagggttgacaatagatctccataaccacaggtcagacctacttctgacccttcctaaccgtttgcttagctttacaaccacataaaagcaaagcacttggtcacaaatccaactttgagccacccaatagactctggatgataaatgaaaactcacaactgaagtaattctatctagcagtttcagcttggccattttaagcaaatagccacagaaggaagtaacgataatctaccctttgttctaattttaaaatgtgaataattaactttccaggaggaagaataacacagacttttaagagtggttcaacctaataaatgtccaatttgaaaacagcttagaactgctggccctaacagccaccttgatttattacagtggtaattcacatgtgaccagccagaaccgcagatgaactgccctgcccagcacctgtactctgtggttgggcacttgaatgctagataacactgaggcttgcagggctggtagtttatagagaaaggacacgcgcgcgcgcacgcacacgtccacatacacacaaacacagagagagagagagagagagacagagacagagacagagagacagagagaaagagagagaaagcaggcatggtggcttattcctataatcccagaactctgaaggctgaggcgtgaggagcgtaagttcgaagctagcctgggcaacatagcaaaatcctgtttcaaaaacaaagcagaacagagtctccagggaattcacatcccaatttattcagaggcttcagactgtccatgcgttatgaggcctcaaagctcctaaagaagggagaggaaatgggaaaagagcaagagggaaagaggagagggatgaggaggaaacatcataaagaaatttggacaccaatctattccttggtttcagaagtgaataaccctggagacaactaaacattaaccaattctgactggcctctggcatctcaggactctaataggagcctggctttaactaaccagctaaaggcagagtggggcaagtggctcagtcagtgaggtgtttgttctgaaggcatgaggacctgaattcaacaccaggacctgcagaagctgctggtggtggcacacttggaaccccaggtctgaggaagtgcagacagacagctcctgaggcttactggccagccagcctacctacattatgagttccagaccaatgagagaccttgtctcgaaacaacacagggtacagacagctcctgaggagcaatgtccaaggttgatcttgggtgggcgtgtgtgtgtgtgtgcacgcgcgcgcgcacacacacacacacacacacac

SEQ ID NO: 38 - protein, 4 aa, Artificial Sequence
  source: /note="Description of Artificial Sequence: Synthetic peptide"
PEST

SEQ ID NO: 39 - DNA, 23 bp, Unknown
  source: /note="Description of Unknown: CPEB2A Target Sequence"
aggggcaacacagtctgctgcta

SEQ ID NO: 40 - DNA, 23 bp, Unknown
  source: /note="Description of Unknown: CPEB2B Target Sequence"
aagctgtattagctttgctgcta

SEQ ID NO: 41 - DNA, 22 bp, Unknown
  source: /note="Description of Unknown: SRPR-alpha Target Sequence"
taatcatgttacaatcactgcc

SEQ ID NO: 42 - DNA, 23 bp, Unknown
  source: /note="Description of Unknown: CNTFR Target Sequence"
caccatcagattataagctcctg

SEQ ID NO: 43 - DNA, 21 bp, Unknown
  source: /note="Description of Unknown: EIF3A Target Sequence"
cagtctaaattgaattcttta
